(19) United States
(12) Patent Application Publication
(10) Pub. No.: US 2024/0002817 A1
(43) Pub. Date: Jan. 4, 2024

(54) ENGINEERED PANTOTHENATE KINASE VARIANT ENZYMES

(71) Applicant: Codexis, Inc., Redwood City, CA (US)

(72) Inventors: Jovana Nazor, Milpitas, CA (US); Mikayla Jianghongxia Krawczyk, Palo Alto, CA (US); Zara Maxine Seibel, San Francisco, CA (US); Nandhitha Subramanian, Cambridge (GB); Joshua Kolev, Califon, NJ (US)

(21) Appl. No.: 18/247,054

(22) PCT Filed: Sep. 29, 2021
(86) PCT No.: PCT/US2021/052644

§ 371 Date: Mar. 28, 2023

Related U.S. Application Data
(60) Provisional application No. 63/086,688, filed on Oct. 2, 2020.

(51) Int. Cl. C12N 9/12; C12N 15/63

(52) U.S. Cl. CPC C12N 9/1205; C12Y 207/01033; C12N 15/63

(57) ABSTRACT

The present invention provides engineered pantothenate kinase (PanK) enzymes, polypeptides having PanK activity, and polynucleotides encoding these enzymes, as well as vectors and host cells comprising these polynucleotides and polypeptides. Methods for producing PanK enzymes are also provided. The present invention further provides compositions comprising the PanK enzymes and methods of using the engineered PanK enzymes. The present invention finds particular use in the production of pharmaceutical compounds.

[0001] The present application claims priority to U.S. Prov. Pat. Appln. Ser. No. 63/086,688, filed Oct. 2, 2020, which is incorporated by reference in its entirety, for all purposes.

### FIELD OF THE INVENTION

[0002] The present invention provides engineered pantothenate kinase (PanK) enzymes, polypeptides having PanK activity, and polynucleotides encoding these enzymes, as well as vectors and host cells comprising these polynucleotides and polypeptides. Methods for producing PanK enzymes are also provided. The present invention further provides compositions comprising the PanK enzymes and methods of using the engineered PanK enzymes. The present invention finds particular use in the production of pharmaceutical compounds.

### REFERENCE TO SEQUENCE LISTING, TABLE OR COMPUTER PROGRAM

[0003] The official copy of the Sequence Listing is submitted concurrently with the specification as an ASCII formatted text file via EFS-Web, with a file name of “CX2-207WO1_ST25.txt”, a creation date of Sep. 29, 2021 and a size of 1.26 megabytes. The Sequence Listing filed via EFS-Web is part of the specification and incorporated in its entirety by reference herein.

### BACKGROUND OF THE INVENTION

[0004] The retrovirus designated as human immunodeficiency virus (HIV) is the etiological agent of acquired immune deficiency syndrome (AIDS), a complex disease that involves progressive destruction of affected individuals' immune systems and degeneration of the central and peripheral nervous systems. A common feature of retrovirus replication is reverse transcription of the viral RNA genome by a virally-encoded reverse transcriptase to generate DNA copies of HIV sequences, required for viral replication. Some compounds, such as MK-8591, are known reverse transcriptase inhibitors and have found use in the treatment of AIDS and similar diseases. While there are some compounds known to inhibit HIV reverse transcriptase, there remains a need in the art for additional compounds that are more effective in inhibiting this enzyme and thereby ameliorating the effects of AIDS.

[0005] Nucleoside analogues such as MK-8591 (Merck) are effective inhibitors of HIV's reverse transcriptase due their similarity to natural nucleosides used in the synthesis of DNA. The binding of these analogues by the reverse transcriptase stalls the synthesis of DNA by inhibiting the progressive nature of the reverse transcriptase. The stalling of the enzyme results in the premature termination of the DNA molecule making it ineffective. However, production of nucleoside analogues by standard chemical synthetic techniques can pose a challenge due to their chemical complexity.

### SUMMARY OF THE INVENTION

[0006] The present invention provides engineered pantothenate kinase (PanK) enzymes, polypeptides having PanK activity, and polynucleotides encoding these enzymes, as well as vectors and host cells comprising these polynucleotides and polypeptides. Methods for producing PanK enzymes are also provided. The present invention further provides compositions comprising the PanK enzymes and methods of using the engineered PanK enzymes. The present invention finds particular use in the production of pharmaceutical compounds.

[0007] In some embodiments, the present invention provides engineered pantothenate kinases comprising polypeptide sequences having at least 85%, 86%, 87%, 88%, 89%, 90%, 91%, 92%, 93%, 94%, 95%, 96%, 97%, 98%, 99%, or more sequence identity to SEQ ID NO: 4, SEQ ID NO: 44, SEQ ID NO: 320, and/or SEQ ID NO: 526, or a functional fragment thereof, wherein the engineered pantothenate kinases comprise at least one substitution or substitution set in the polypeptide sequences, and wherein the amino acid positions of the polypeptide sequences are numbered with reference to SEQ ID NO: 4, SEQ ID NO: 44, SEQ ID NO: 320, and/or SEQ ID NO: 526.

[0008] In some embodiments, the present invention provides engineered pantothenate kinases comprising polypeptide sequences having at least 85%, 86%, 87%, 88%, 89%, 90%, 91%, 92%, 93%, 94%, 95%, 96%, 97%, 98%, 99%, or more sequence identity to SEQ ID NO: 4, or a functional fragment thereof, wherein the engineered pantothenate kinases comprise at least one substitution or substitution set in the polypeptide sequences, and wherein the amino acid positions of the polypeptide sequences are numbered with reference to SEQ ID NO: 4. In some embodiments, the engineered pantothenate kinase comprises a polypeptide sequence having at least 85%, 86%, 87%, 88%, 89%, 90%, 91%, 92%, 93%, 94%, 95%, 96%, 97%, 98%, 99%, or more sequence identity to SEQ ID NO: 4, or a functional fragment thereof, and wherein the engineered pantothenate kinase comprises at least one substitution or substitution set at one or more positions selected from 17, 19, 26, 31, 33, 34, 35, 37, 44, 46, 63, 73, 74, 76, 77, 79, 80, 82, 85, 91, 94, 95, 96, 103, 103/135, 103/135/141, 103/135/216, 103/135/291, 103/141, 103/141/193/216/238, 103/141/216, 103/141/238, 103/216/238, 120, 124, 126, 128, 129, 130, 135, 135/141/238, 135/141/298/323, 135/193/238/289/291, 135/219, 135/238/291, 135/248/251/291/297, 135/251/323, 135/323, 141, 141/193/251/323, 141/251, 141/251/323, 141/297, 141/323, 145, 154, 164, 193, 193/216, 194, 195, 197, 198, 216, 218, 221, 222, 225, 227, 233, 238, 247, 248, 250, 251, 274, 286, 287, 289, 290, 291, 293, 297, 308, 315, and 323, and wherein the amino acid positions of the polypeptide sequence are numbered with reference to SEQ ID NO: 4. In some additional embodiments, the engineered pantothenate kinase comprises at least one substitution or substitution set selected from 17V, 19L, 26A, 26T, 31R, 33I, 34A, 35R, 35S, 37F, 44W, 46K, 63L, 73G, 74L, 76V, 77L, 79A, 79S, 79Y, 80E, 82T, 85S, 91C, 94S, 95G, 96P, 103V, 103V/135S, 103V/135S/141L, 103V/135S/216G, 103V/135S/291K, 103V/141L, 103V/141L/193V/216G/238F, 103V/141L/216G, 103V/141L/238F, 103V/216G/238F, 120L, 120T, 124G, 126Q, 126S, 126V, 128S, 129G, 129S, 130Y, 135S, 135S/141L/238F, 135S/141L/298A/323C, 135S/193V/238F/289A/291K, 135S/219G, 135S/238F/291K, 135S/248A/251L/291K/297R, 135S/251L/323C, 135S/323C, 141L, 141L/193V/251L/323C, 141L/251L, 141L/251L/323C, 141L/297V, 141L/323C, 145I, 154H, 154R, 164P, 193V, 193V/216G, 194H, 195A, 195G, 197G, 197V, 198R, 216G, 218C, 221E, 221S, 222G, 225Y, 227T, 233C, 238F, 247T, 248A, 248S, 250F, 251L, 274A, 286D, 287L, 289A, 289S, 290G, 291G, 293L, 297R, 297V, 308A, 315L, and 323C, wherein the amino acid positions of the polypeptide sequence are numbered with reference to SEQ ID NO: 4. In some additional embodiments, the engineered pantothenate kinase comprises at least one substitution or substitution set selected from T17V, M19L, D26A, D26T, A31R, V33I, R34A, D35R, D35S, N37F, D44W, I46K, E63L, N73G, F74L, I76V, S77L, N79A, N79S, N79Y, L80E, R82T, Q85S, G91C, G94S, Q95G, R96P, 1103V, 1103V/T135S, 1103V/T135S/H141L, 1103V/T135S/5216G, I103V/T135S/M291K, 1103V/H141L, 1103V/H141L/1193V/5216G/Y238F, 1103V/H141L/5216G, 1103V/H141L/Y238F, 1103V/5216G/Y238F, A120L, A120T, R124G, P126Q, P126S, P126V, H128S, R129G, R129S, R130Y, T135S, T135S/H141L/Y238F, T135S/H141L/Q298A/R323C, T135S/1193V/Y238F/K289A/M291K, T135S/D219G, T135S/Y238F/M291K, T135S/T248A/1251L/M291K/K297R, T135S/1251L/R323C, T135S/R323C, H141L, H141L/I193V/I251L/R323C, H141L/I251L, H141L/I251L/R323C, H141L/K297V, H141L/R323C, V145I, K154H, K154R, H164P, I193V, 1193V/5216G, P194H, D195A, D195G, D197G, D197V, K198R, S216G, M218C, P221E, P221S, H222G, H225Y, V227T, V233C, Y238F, Q247T, T248A, T248S, Y250F, I251L, K274A, T286D, I287L, K289A, K289S, E290G, M291G, S293L, K297R, K297V, 5308A, A315L, and R323C, wherein the amino acid positions of the polypeptide sequence are numbered with reference to SEQ ID NO: 4. In some embodiments, the engineered pantothenate kinase comprises a polypeptide sequence that is at least 85%, 86%, 87%, 88%, 89%, 90%, 91%, 92%, 93%, 94%, 95%, 96%, 97%, 98%, 99% or more identical to the sequence of at least one engineered pantothenate kinase variant set forth in Table 5-1.

[0009] In some further embodiments, the engineered pantothenate kinase comprises a polypeptide sequence that is at least 85%, 86%, 87%, 88%, 89%, 90%, 91%, 92%, 93%, 94%, 95%, 96%, 97%, 98%, 99% or more identical to SEQ ID NO: 4. In some additional embodiments, the engineered pantothenate kinase is a variant engineered polypeptide set forth in SEQ ID NO: 4.

[0010] In some embodiments, the present invention provides engineered pantothenate kinases comprising polypeptide sequences having at least 85%, 86%, 87%, 88%, 89%, 90%, 91%, 92%, 93%, 94%, 95%, 96%, 97%, 98%, 99%, or more sequence identity to SEQ ID NO: 44, or a functional fragment thereof, wherein the engineered pantothenate kinases comprise at least one substitution or substitution set in the polypeptide sequences, and wherein the amino acid positions of the polypeptide sequences are numbered with reference to SEQ ID NO: 44. In some embodiments, the engineered pantothenate kinase comprises a polypeptide sequence having at least 85%, 86%, 87%, 88%, 89%, 90%, 91%, 92%, 93%, 94%, 95%, 96%, 97%, 98%, 99%, or more sequence identity to SEQ ID NO: 44, or a functional fragment thereof, and wherein the engineered pantothenate kinase comprises at least one substitution or substitution set at one or more positions selected from 16/93/120/221/308, 16/141/179/282, 17, 17/34, 17/34/46, 17/34/96/128/129/164, 17/46, 17/46/63, 17/46/63/96, 17/46/63/164, 17/46/126/128/129/164, 17/46/128/129/130/164/193, 17/46/164, 17/63, 17/63/79, 17/63/79/128/129/130/164, 17/63/96, 17/63/96/164, 17/63/129/130, 17/63/164, 17/63/193, 17/79/128/129/130, 17/126, 17/126/129/130/164, 17/126/129/164, 19, 19/35/85/274, 19/35/197/218/275, 19/74/77/141/218, 19/74/145, 19/77/141/218/225, 19/85/145/197/218/308, 19/141, 19/141/225, 20/59/93, 20/59/93/141/321, 20/59/120/164/263/282, 20/164, 20/282, 20/308, 26/31/33/35/76/79/94/221/293, 26/31/33/35/120/141/293, 26/31/33/76/79, 26/31/33/76/79/94, 26/31/120, 26/33/35/126/222/291, 26/33/80/126/291/293, 26/33/94/293, 26/35/79/120/126/194/198, 26/35/120/222/227/293, 26/35/126, 31/33/35/76/79/91/291, 31/33/35/76/141/293, 31/33/35/120/126/227, 31/33/35/126, 31/33/76/79/80/94/291, 31/33/76/79/95, 31/33/120, 31/35/80/94/126/141/293, 31/76/79/120/126/293, 31/76/79/293, 32/46, 33/35, 33/35/76/79/120/141/198/221, 33/35/76/80/126/221/222/227, 33/35/76/80/293, 33/35/94/126/141, 33/35/126/198/293, 33/35/126/222/227, 33/35/126/293, 33/35/221/222, 33/76/79, 33/76/79/126, 33/79/126/221/227/293, 34, 34/46, 34/46/48, 34/46/63, 34/46/63/164, 34/46/79/96/126, 34/46/79/164, 34/46/164, 34/63/126/129/193, 34/79/126/128/130, 34/164, 35, 35/74/77/197/225, 35/74/218, 35/76, 35/76/80/126, 35/77/218, 35/85, 35/85/141/218, 35/85/218/225, 35/85/218/274, 35/141/195/218/274, 35/145/286, 35/197/274, 35/218/308, 35/274, 46, 46/63, 46/79, 46/79/126/193, 46/96/164, 46/128/129/164, 46/129, 46/164, 46/164/193, 46/193, 59, 59/120, 63, 63/164, 63/193, 74/85/145, 74/141, 76/79/80/120, 77/85/145, 77/218, 79/96/126/129, 79/126/164, 94/95/120/291, 94/126/293, 94/293, 120, 120/164/282/321, 126/128/129/193, 126/129/164, 128/129/130, 141/195/197/218, 164, 164/221/308, 218, 225, 263, 274, and 308, wherein the amino acid positions of the polypeptide sequences are numbered with reference to SEQ ID NO: 44. In some additional embodiments, the engineered pantothenate kinase comprises at least one substitution or substitution set selected from 16R/93G/120V/221C/308M, 16R/141H/179V/282A, 17V, 17V/34A, 17V/34A/46K, 17V/34A/96P/128S/129G/164P, 17V/46K, 17V/46K/63L, 17V/46K/63L/96P, 17V/46K/63L/164P, 17V/46K/126V/128S/129S/164P, 17V/46K/128S/129G/130Y/164P/193V, 17V/46K/164P, 17V/63L, 17V/63L/79S, 17V/63L/79S/128S/129G/130Y/164P, 17V/63L/96P, 17V/63L/96P/164P, 17V/63L/129S/130Y, 17V/63L/164P, 17V/63L/193V, 17V/79S/128S/129S/130Y, 17V/126Q/129G/164P, 17V/126V, 17V/126V/129S/130Y/164P, 19L, 19L/35R/85S/274A, 19L/35R/197G/218C/275M, 19L/74L/77L/141H/218C, 19L/74L/145I, 19L/77L/141H/218C/225Y, 19L/85S/145I/197G/218C/308A, 19L/141H, 19L/141H/225Y, 20G/59A/93G/141H/321L, 20G/59R/120V/164S/263M/282A, 20G/164S, 20G/164S/179V/308M/320K, 20G/308M, 26T/31R/33I/35S/76V/79A/94S/221E/293L, 26T/31R/33I/35S/120T/141H/293L, 26T/31R/33I/76V/79A, 26T/31R/33I/76V/79A/94S, 26T/31R/120T, 26T/33I/35S/126S/222G/291G, 26T/33I/80E/126S/291G/293L, 26T/33I/94S/293L, 26T/35S/79A/120T/126S/194H/198R, 26T/35S/120T/222G/227T/293L, 26T/35S/126S, 31R/33I/35S/76V/79A/91C/291G, 31R/33I/35S/76V/141H/293L, 31R/33I/35S/120T/126S/227T, 31R/33I/35S/126S, 31R/33I/76V/79A/80E/94S/291G, 31R/33I/76V/79A/95G, 31R/33I/120T, 31R/35S/80E/94S/126S/141H/293L, 31R/76V/79A/120T/126S/293L, 31R/76V/79A/293L, 32S/46K, 33F/35S/126S/293P, 33I/35S, 33I/35S/76V/79A/120T/141H/198R/221E, 33I/35S/76V/80E/126S/221E/222G/227T, 33I/35S/76V/80E/293L, 33I/35S/94S/126S/141H, 33I/35S/126S/198R/293L, 33I/35S/126S/222G/227T, 33I/35S/221E/222G, 33I/76V/79A, 33I/76V/79A/126S, 33I/79A/126S/221E/227T/293L, 34A, 34A/46K, 34A/46K/48C, 34A/46K/63L, 34A/46K/63L/164P, 34A/46K/79S/96P/126V, 34A/46K/79S/164P, 34A/46K/164P, 34A/63L/126V/129S/193V, 34A/79S/126Q/128S/130Y, 34A/164P, 35R, 35R/74L/77L/197V/225Y, 35R/77L/218C, 35R/85S, 35R/85S/141H/218C, 35R/85S/218C/225Y, 35R/141H/195G/218C/274A, 35R/145I/286D, 35R/197V/274A, 35R/274A, 35S/76V, 35S/76V/79A/80E/126S, 35S/76V/80E/126S, S/94S/120T/126S/293L, 46K, 46K/63L, 46K/79S, 46K/79S/126V/193V, 46K/96P/164P, 46K/128S/129G/164P, 46K/129G, 46K/164P, 46K/164P/193V, 46K/193V, 59R, 59R/120V, 63L, 63L/164P, 63L/193V, 74L/85S/145I, 74L/141H, 76V/79A/80E/120T, 77L/85S/145I, 77L/218C, 79S/96P/126Q/129S, 79S/126V/164P, 80E/126S/221E/227T, 94S/95G/120T/291G, 94S/126S/293L, 94S/293L, 120V, 120V/164S/282A/321L, 126V/128S/129G/193V, 126V/129G/164P, 128S/129G/130Y, 141H/195G/197G/218C, 164S, 164S/221C/308M, 218C, 225Y, 263M, 274A, 308A, and 308M, wherein the amino acid positions of the polypeptide sequences are numbered with reference to SEQ ID NO: 44. In some additional embodiments, the engineered pantothenate kinase comprises at least one substitution or substitution set selected from Q16R/N93G/A120V/P221C/S308M, Q16R/L141H/N179V/K282A, T17V, T17V/R34A, T17V/R34A/146K, T17V/R34A/R96P/H128S/R129G/H164P, T17V/146K, T17V/146K/E63L, T17V/146K/E63L/R96P, T17V/146K/E63L/H164P, T17V/146K/P126V/H128S/R129S/H164P, T17V/146K/H128S/R129G/R130Y/H164P/1193V, T17V/146K/H164P, T17V/E63L, T17V/E63L/N79S, T17V/E63L/N79S/H128S/R129G/R130Y/H164P, T17V/E63L/R96P, T17V/E63L/R96P/H164P, T17V/E63L/R129S/R130Y, T17V/E63L/H164P, T17V/E63L/1193V, T17V/N79S/H128S/R129S/R130Y, T17V/P126Q/R129G/H164P, T17V/P126V, T17V/P126V/R129S/R130Y/H164P, M19L, M19L/D35R/Q85S/K274A, M19L/D35R/D197G/M218C/L275M, M19L/F74L/S77L/L141H/M218C, M19L/F74LN145I, M19L/S77L/L141H/M218C/H225Y, M19L/Q85SN145I/D197G/M218C/S308A, M19L/L141H, M19L/L141H/H225Y, T20G/E59A/N93G/L141H/E321L, T20G/E59R/N93G, T20G/E59R/A120V/H164S/T263M/K282A, T20G/H164S, T20G/H164S/N179V/S308M/E320K, T20G/K282A, T20G/S308M, D26T/A31R/V33I/D35S/176V/N79A/G94S/P221E/S293L, D26T/A31R/V33I/D35S/A120T/L141H/S293L, D26T/A31R/V33I/176V/N79A, D26T/A31R/V33I/176V/N79A/G94S, D26T/A31R/A120T, D26TN33I/D35S/P126S/H222G/M291G, D26TN33I/L80E/P126S/M291G/S293L, D26T/V33I/G94S/S293L, D26T/D35S/N79A/A120T/P126S/P194H/K198R, D26T/D35S/A120T/H222GN227T/S293L, D26T/D35S/P126S, A31R/V33I/D35S/176V/N79A/G91C/M291G, A31R/V33I/D35S/176V/L141H/S293L, A31R/V33I/D35S/A120T/P126SN227T, A31R/V33I/D35S/P126S, A31R/V33I/176V/N79A/L80E/G94S/M291G, A31R/V33I/176V/N79A/Q95G, A31R/V33I/A120T, A31R/D35S/L80E/G94S/P126S/L141H/S293L, A31R/I76V/N79A/A120T/P126S/S293L, A31R/I76V/N79A/S293L, A32S/I46K, V33F/D35S/P126S/S293P, V33I/D35S, V33I/D35S/176V/N79A/A120T/L141H/K198R/P221E, V33I/D35S/176V/L80E/P126S/P221E/H222GN227T, V33I/D35S/176V/L80E/5293L, V33I/D35S/G94S/P126S/L141H, V33I/D35S/P126S/K198R/S293L, V33I/D35S/P126S/H222GN227T, V33I/D35S/P221E/H222G, V33I/176V/N79A, V33I/176V/N79A/P126S, V33I/N79A/P126S/P221EN227T/S293L, R34A, R34A/I46K, R34A/146K/R48C, R34A/146K/E63L, R34A/I46K/E63L/H164P, R34A/I46K/N79S/R96P/P126V, R34A/I46K/N79S/H164P, R34A/I46K/H164P, R34A/E63L/P126V/R129S/I193V, R34A/N79S/P126Q/H128S/R130Y, R34A/H164P, D35R, D35R/F74L/S77L/D197V/H225Y, D35R/F74L/M218C, D35R/S77L/M218C, D35R/Q85S, D35R/Q85S/L141H/M218C, D35R/Q85S/M218C/H225Y, D35R/Q85S/M218C/K274A, D35R/L141H/D195G/M218C/K274A, D35R/V145I/T286D, D35R/D197V/K274A, D35R/M218C/S308A, D35R/K274A, D35S/I76V, D35S/176V/N79A/L80E/P126S, D35S/176V/L80E/P126S, D35S/G94S/A120T/P126S/S293L, I46K, I46K/E63L, I46K/N79S, 146K/N79S/P126V/I193V, 146K/R96P/H164P, 146K/H128S/R129G/H164P, I46K/R129G, 146K/H164P, 146K/H164P/I193V, 146K/I193V, E59R, E59R/A120V, E63L, E63L/H164P, E63L/I193V, F74L/Q85SN145I, F74L/L141H, 176V/N79A/L80E/A120T, S77L/Q85SN145I, S77L/M218C, N79S/R96P/P126Q/R129S, N79S/P126V/H164P, L80E/P126S/P221EN227T, G94S/Q95G/A120T/M291G, G94S/P126S/S293L, G94S/S293L, A120V, A120V/H164S/K282A/E321L, P126V/H128S/R129G/1193V, P126V/R129G/H164P, H128S/R129G/R130Y, L141H/D195G/D197G/M218C, H164S, H164S/P221C/S308M, M218C, H225Y, T263M, K274A, 5308A, and 5308M, wherein the amino acid positions of the polypeptide sequences are numbered with reference to SEQ ID NO: 44. In some embodiments, the engineered pantothenate kinase comprises a polypeptide sequence that is at least 85%, 86%, 87%, 88%, 89%, 90%, 91%, 92%, 93%, 94%, 95%, 96%, 97%, 98%, 99% or more identical to the sequence of at least one engineered pantothenate kinase variant set forth in Table 6-1. In some further embodiments, the engineered pantothenate kinase comprises a polypeptide sequence that is at least 85%, 86%, 87%, 88%, 89%, 90%, 91%, 92%, 93%, 94%, 95%, 96%, 97%, 98%, 99% or more identical to SEQ ID NO: 44. In some additional embodiments, the engineered pantothenate kinase is a variant engineered polypeptide set forth in SEQ ID NO: 44.

[0011] In some embodiments, the present invention provides engineered pantothenate kinases comprising polypeptide sequences having at least 85%, 86%, 87%, 88%, 89%, 90%, 91%, 92%, 93%, 94%, 95%, 96%, 97%, 98%, 99%, or more sequence identity to SEQ ID NO: 320, or a functional fragment thereof, wherein the engineered pantothenate kinases comprise at least one substitution or substitution set in the polypeptide sequences, and wherein the amino acid positions of the polypeptide sequences are numbered with reference to SEQ ID NO: 320. In some embodiments, the engineered pantothenate kinase comprises a polypeptide sequence having at least 85%, 86%, 87%, 88%, 89%, 90%, 91%, 92%, 93%, 94%, 95%, 96%, 97%, 98%, 99%, or more sequence identity to SEQ ID NO: 320, or a functional fragment thereof, and wherein the engineered pantothenate kinase comprises at least one substitution or substitution set at one or more positions selected from 20/31/35/74/79/164/218/225/282, 20/35/120/197, 20/48/218/227, 20/94/120, 20/120/145/197/227, 20/197/225/227, 24, 33, 46, 48, 48/63, 48/63/74/79/120/129/227/282, 48/63/94/275, 48/63/145, 63, 63/120/197/218/275, 63/129/145, 63/218/275/282, 74/79/94/275, 94/120, 95, 130, 149, 164, 178, 196, 201, 221, 271, 277, 282, 289, 293, 298, 314, and 321, wherein the amino acid positions of the polypeptide sequences are numbered with reference to SEQ ID NO: 320. In some additional embodiments, the engineered pantothenate kinase comprises at least one substitution or substitution set selected from 20G/31R/35D/48C/63L/74L/94S/120T/164P, 20G/35D/120T/197G, 20G/48C/218C/227V, 20G/94S/120T, 20G/197G/225Y/227V, 24H, 24V, 33V, 46A, 48C/63L, 48C/63L/74L/79S/120T/129G/227V/282A, 48C/63L/94S/275M, 48C/63L/145I, 48V, 63L, 63L/120T/197G/218C/275M, 63L/129S/145I, 63L/218C/275M/282A, 74L/79A/94S/275M, 94S/120T, 95D, 95E, 130L, 149A, 164G, 178D, 178H, 1961, 201G, 221G, 271C, 271M, 277R, 282D, 289C, 293Y, 298D, 298E, 314G, and 321L, wherein the amino acid positions of the polypeptide sequences are numbered with reference to SEQ ID NO: 320. In some additional embodiments, the engineered pantothenate kinase comprises at least one substitution or substitution set selected from T20G/A31R/S35D/R48C/E63L/F74L/G94S/A120T/H164P, T20G/A31R/S35D/F74L/N79A/H164S/M218C/H225Y/K282A, T20G/S35D/A120T/D197G, T20G/R48C/E63L/G94S/A120TN145I/D197G/M218C/T227V, T20G/R48C/M218C/T227V, T20G/G94S/A120T, T20G/A120TN145I/D197G/T227V, T20G/D197G/H225Y/T227V, Q24H, Q24V, I33V, I46A, R48C/E63L, R48C/E63L/F74L/N79S/A120T/R129G/T227V/K282A, R48C/E63L/G94S/L275M, R48C/E63LN145I, R48V, E63L, E63L/A120T/D197G/M218C/L275M, E63L/R129SN145I, E63L/M218C/L275M/K282A, F74L/N79A/G94S/L275M, G94S/A120T, Q95D, Q95E, R130L, R149A, H164G, P178D, P178H, G1961, V201G, P221G, G271C, G271M, K277R, K282D, K289C, S293Y, Q298D, Q298E, S314G, and E321L, wherein the amino acid positions of the polypeptide sequences are numbered with reference to SEQ ID NO: 320. In some embodiments, the engineered pantothenate kinase comprises a polypeptide sequence that is at least 85%, 86%, 87%, 88%, 89%, 90%, 91%, 92%, 93%, 94%, 95%, 96%, 97%, 98%, 99% or more identical to the sequence of at least one engineered pantothenate kinase variant set forth in Table 7-1. In some further embodiments, the engineered pantothenate kinase comprises a polypeptide sequence that is at least 85%, 86%, 87%, 88%, 89%, 90%, 91%, 92%, 93%, 94%, 95%, 96%, 97%, 98%, 99% or more identical to SEQ ID NO: 320. In some additional embodiments, the engineered pantothenate kinase is a variant engineered polypeptide set forth in SEQ ID NO: 320.

[0012] In some embodiments, the present invention provides engineered pantothenate kinases comprising polypeptide sequences having at least 85%, 86%, 87%, 88%, 89%, 90%, 91%, 92%, 93%, 94%, 95%, 96%, 97%, 98%, 99%, or more sequence identity to SEQ ID NO: 526, or a functional fragment thereof, wherein the engineered pantothenate kinases comprise at least one substitution or substitution set in the polypeptide sequences, and wherein the amino acid positions of the polypeptide sequences are numbered with reference to SEQ ID NO: 526. In some embodiments, the engineered pantothenate kinase comprises a polypeptide sequence having at least 85%, 86%, 87%, 88%, 89%, 90%, 91%, 92%, 93%, 94%, 95%, 96%, 97%, 98%, 99%, or more sequence identity to SEQ ID NO: 526, or a functional fragment thereof, and wherein the engineered pantothenate kinase comprises at least one substitution or substitution set at one or more positions selected from 24, 24/33, 24/46/221, 24/95/164/178/201/282, 24/149/178/282/293/298, 24/149/201/282, 24/149/282/314, 24/178/201/271/282/293/298/314, 24/201/271/282/293/298, 24/201/282, 24/227, 33/95/104, 46/95/282, 48, 95/201/282/293/314, 164/201/271/314, 178/293/298, 201, 201/282, 221/289, 282/293/298/314/321, and 298, wherein the amino acid positions of the polypeptide sequences are numbered with reference to SEQ ID NO: 526. In some additional embodiments, the engineered pantothenate kinase comprises at least one substitution or substitution set selected from 24H/33V, 24H/46V/221G, 24H/227V, 24V, 24V/95D/164G/178D/201G/282D, 24V/149A/178D/282D/293Y/298E, 24V/149A/201G/282D, 24V/149A/282D/314G, 24V/178D/201G/271C/282D/293Y/298E/314G, 24V/201G/271C/282D/293Y/298E, 24V/201G/282D, 33V/95N/104T, 46V/95E/282A, 48V, 95D/201G/282D/293Y/314G, 164G/201G/271C/314G, 178D/293Y/298D, 201G, 201G/282D, 221G/289C, 282D/293Y/298E/314G/321L, and 298D, wherein the amino acid positions of the polypeptide sequences are numbered with reference to SEQ ID NO: 526. In some additional embodiments, the engineered pantothenate kinase comprises at least one substitution or substitution set selected from Q24H/133V, Q24H/I46V/P221G, Q24H/T227V, Q24V, Q24V/Q95D/H164G/P178DN201G/K282D, Q24V/R149A/P178D/K282D/S293Y/Q298E, Q24V/R149AN201G/K282D, Q24V/R149A/K282D/S314G, Q24V/P178DN201G/G271C/K282D/S293Y/Q298E/S314G, Q24VN201G/G271C/K282D/S293Y/Q298E, Q24VN201G/K282D, I33V/Q95N/A104T, I46V/Q95E/K282A, C48V, Q95DN201G/K282D/S293Y/S314G, H164GN201G/G271C/S314G, P178D/S293Y/Q298D, V201G, V201G/K282D, P221G/K289C, K282D/S293Y/Q298E/S314G/E321L, and Q298D, wherein the amino acid positions of the polypeptide sequences are numbered with reference to SEQ ID NO: 526. In some embodiments, the engineered pantothenate kinase comprises a polypeptide sequence that is at least 85%, 86%, 87%, 88%, 89%, 90%, 91%, 92%, 93%, 94%, 95%, 96%, 97%, 98%, 99% or more identical to the sequence of at least one engineered pantothenate kinase variant set forth in Table 8-1. In some further embodiments, the engineered pantothenate kinase comprises a polypeptide sequence that is at least 85%, 86%, 87%, 88%, 89%, 90%, 91%, 92%, 93%, 94%, 95%, 96%, 97%, 98%, 99% or more identical to SEQ ID NO: 526. In some additional embodiments, the engineered pantothenate kinase is a variant engineered polypeptide set forth in SEQ ID NO: 526.

[0013] In some further embodiments, the engineered pantothenate kinase comprises a polypeptide sequence that is at least 85%, 86%, 87%, 88%, 89%, 90%, 91%, 92%, 93%, 94%, 95%, 96%, 97%, 98%, 99% or more identical to the sequence of at least one engineered pantothenate kinase variant set forth in the even numbered sequences of SEQ ID NOS: 4-630. In some additional embodiments, the engineered pantothenate kinase comprises a polypeptide sequence forth in the even numbered sequences of SEQ ID NOS: 4-630. In some further embodiments, the engineered pantothenate kinase comprises at least one improved property compared to wild-type E. coli pantothenate kinase. In still some additional embodiments, the improved property comprises improved activity on a substrate, as compared to a wild-type pantothenate kinase. In some further embodiments, the substrate comprises an alcohol. In some further embodiments, the substrate comprises an aldehyde. In some additional embodiments, the improved property comprises improved production of phospho-ethynyl glycerol, as compared to a wild-type pantothenate kinase. In some further embodiments, the engineered pantothenate kinase is purified. The present invention also provides compositions comprising at least one engineered pantothenate kinase provided herein. In some embodiments, the present invention provides compositions comprising one engineered pantothenate kinase provided herein.

[0014] The present invention also provides polynucleotide sequences encoding at least one engineered pantothenate kinase provided herein. In some embodiments, the polynucleotide sequence encoding at least one engineered pantothenate kinase comprises at least 85%, 86%, 87%, 88%, 89%, 90%, 91%, 92%, 93%, 94%, 95%, 96%, 97%, 98%, 99%, or more sequence identity to SEQ ID NO: 3, SEQ ID NO: 43, SEQ ID NO: 319, and/or SEQ ID NO: 525. In some embodiments, the polynucleotide sequence of the engineered pantothenate kinase comprises at least one substitution at one or more positions. In some further embodiments, the polynucleotide sequence encoding at least one engineered pantothenate kinase comprises at least 85%, 86%, 87%, 88%, 89%, 90%, 91%, 92%, 93%, 94%, 95%, 96%, 97%, 98%, 99%, or more sequence identity to SEQ ID NO: 3, or a functional fragment thereof. In some further embodiments, the polynucleotide sequence encoding at least one engineered pantothenate kinase comprises at least 85%, 86%, 87%, 88%, 89%, 90%, 91%, 92%, 93%, 94%, 95%, 96%, 97%, 98%, 99%, or more sequence identity to SEQ ID NO: 43, or a functional fragment thereof. In some further embodiments, the polynucleotide sequence encoding at least one engineered pantothenate kinase comprises at least 85%, 86%, 87%, 88%, 89%, 90%, 91%, 92%, 93%, 94%, 95%, 96%, 97%, 98%, 99%, or more sequence identity to SEQ ID NO: 319, ora functional fragment thereof. In some further embodiments, the polynucleotide sequence encoding at least one engineered pantothenate kinase comprises at least 85%, 86%, 87%, 88%, 89%, 90%, 91%, 92%, 93%, 94%, 95%, 96%, 97%, 98%, 99%, or more sequence identity to SEQ ID NO: 525, or a functional fragment thereof. In some additional embodiments, the polynucleotide sequence is operably linked to a control sequence. In some embodiments, the polynucleotide sequence is codon optimized. In some further embodiments, the polynucleotide comprises an odd-numbered sequence of SEQ ID NOS: 1-629. The present invention also provides expression vectors comprising at least one polynucleotide sequence encoding a pantothenate kinase provided herein. In some embodiments, the expression vectors comprise one polynucleotide sequence encoding a pantothenate kinase provided herein. The present invention also provides host cells comprising at least one expression vector provided herein. The present invention also provides host cells comprising at least one polynucleotide sequence encoding a pantothenate kinase provided herein.

[0015] The present invention also provides methods of producing an engineered pantothenate kinase in a host cell, comprising culturing the host cell provided herein, under suitable conditions, such that at least one engineered pantothenate kinase is produced. In some embodiments, the methods further comprise recovering at least one engineered pantothenate kinase from the culture and/or host cell. In some additional embodiments, the methods further comprise the step of purifying the at least one engineered pantothenate kinase.

### DESCRIPTION OF THE INVENTION

[0016] The present invention provides engineered pantothenate kinase (PanK) enzymes, polypeptides having PanK activity, and polynucleotides encoding these enzymes, as well as vectors and host cells comprising these polynucleotides and polypeptides. Methods for producing PanK enzymes are also provided. The present invention further provides compositions comprising the PanK enzymes and methods of using the engineered PanK enzymes. The present invention finds particular use in the production of pharmaceutical compounds.

[0017] Unless defined otherwise, all technical and scientific terms used herein generally have the same meaning as commonly understood by one of ordinary skill in the art to which this invention pertains. Generally, the nomenclature used herein and the laboratory procedures of cell culture, molecular genetics, microbiology, organic chemistry, analytical chemistry and nucleic acid chemistry described below are those well-known and commonly employed in the art. Such techniques are well-known and described in numerous texts and reference works well known to those of skill in the art. Standard techniques, or modifications thereof, are used for chemical syntheses and chemical analyses. All patents, patent applications, articles and publications mentioned herein, both supra and infra, are hereby expressly incorporated herein by reference.

[0018] Although any suitable methods and materials similar or equivalent to those described herein find use in the practice of the present invention, some methods and materials are described herein. It is to be understood that this invention is not limited to the particular methodology, protocols, and reagents described, as these may vary, depending upon the context they are used by those of skill in the art. Accordingly, the terms defined immediately below are more fully described by reference to the invention as a whole.

[0019] It is to be understood that both the foregoing general description and the following detailed description are exemplary and explanatory only and are not restrictive of the present invention. The section headings used herein are for organizational purposes only and not to be construed as limiting the subject matter described. Numeric ranges are inclusive of the numbers defining the range. Thus, every numerical range disclosed herein is intended to encompass every narrower numerical range that falls within such broader numerical range, as if such narrower numerical ranges were all expressly written herein. It is also intended that every maximum (or minimum) numerical limitation disclosed herein includes every lower (or higher) numerical limitation, as if such lower (or higher) numerical limitations were expressly written herein.

### Abbreviations

[0020] The abbreviations used for the genetically encoded amino acids are conventional and are as follows: alanine (Ala or A), arginine (Arg or R), asparagine (Asn or N), aspartate (Asp or D), cysteine (Cys or C), glutamate (Glu or E), glutamine (Gln or Q), histidine (His or H), isoleucine (Ile or I), leucine (Leu or L), lysine (Lys or K), methionine (Met or M), phenylalanine (Phe or F), proline (Pro or P), serine (Ser or S), threonine (Thr or T), tryptophan (Trp or W), tyrosine (Tyr or Y), and valine (Val or V).

[0021] When the three-letter abbreviations are used, unless specifically preceded by an “L” or a “D” or clear from the context in which the abbreviation is used, the amino acid may be in either the L- or D-configuration about α-carbon (C_{α}). For example, whereas “Ala” designates alanine without specifying the configuration about the α-carbon, “D-Ala” and “L-Ala” designate D-alanine and L-alanine, respectively. When the one-letter abbreviations are used, upper case letters designate amino acids in the L-configuration about the α-carbon and lower case letters designate amino acids in the D-configuration about the α-carbon. For example, “A” designates L-alanine and “a” designates D-alanine. When polypeptide sequences are presented as a string of one-letter or three-letter abbreviations (or mixtures thereof), the sequences are presented in the amino (N) to carboxy (C) direction in accordance with common convention.

[0022] The abbreviations used for the genetically encoding nucleosides are conventional and are as follows: adenosine (A); guanosine (G); cytidine (C); thymidine (T); and uridine (U). Unless specifically delineated, the abbreviated nucleosides may be either ribonucleosides or 2′-deoxyribonucleosides. The nucleosides may be specified as being either ribonucleosides or 2′-deoxyribonucleosides on an individual basis or on an aggregate basis. When nucleic acid sequences are presented as a string of one-letter abbreviations, the sequences are presented in the 5′ to 3′ direction in accordance with common convention, and the phosphates are not indicated.

### Definitions

[0023] In reference to the present invention, the technical and scientific terms used in the descriptions herein will have the meanings commonly understood by one of ordinary skill in the art, unless specifically defined otherwise. Accordingly, the following terms are intended to have the following meanings.

[0024] As used herein, the singular forms “a”, “an” and “the” include plural referents unless the context clearly indicates otherwise. Thus, for example, reference to “a polypeptide” includes more than one polypeptide.

[0025] Similarly, “comprise,” “comprises,” “comprising” “include,” “includes,” and “including” are interchangeable and not intended to be limiting. Thus, as used herein, the term “comprising” and its cognates are used in their inclusive sense (i.e., equivalent to the term “including” and its corresponding cognates).

[0026] It is to be further understood that where descriptions of various embodiments use the term “comprising,” those skilled in the art would understand that in some specific instances, an embodiment can be alternatively described using language “consisting essentially of” or “consisting of.”

[0027] As used herein, the term “about” means an acceptable error for a particular value. In some instances, “about” means within 0.05%, 0.5%, 1.0%, or 2.0%, of a given value range. In some instances, “about” means within 1, 2, 3, or 4 standard deviations of a given value.

[0028] As used herein, “EC” number refers to the Enzyme Nomenclature of the Nomenclature Committee of the International Union of Biochemistry and Molecular Biology (NC-IUBMB). The IUBMB biochemical classification is a numerical classification system for enzymes based on the chemical reactions they catalyze.

[0029] As used herein, “ATCC” refers to the American Type Culture Collection whose biorepository collection includes genes and strains.

[0030] As used herein, “NCBI” refers to National Center for Biological Information and the sequence databases provided therein.

[0031] As used herein, “pantothenate kinase,” “PanK,” refer to enzymes (EC 2.7.1.33), that phosphorylate pantothenate to form 4′-phosphopantothenate or variant enzymes derived from such PanK enzymes, whether or not such variant enzymes retain the same functionality as the source (i.e., “parent”) enzyme. This includes both naturally-occurring or wild-type enzymes and enzymes generated by human engineering.

[0032] “Protein,” “polypeptide,” and “peptide” are used interchangeably herein to denote a polymer of at least two amino acids covalently linked by an amide bond, regardless of length or post-translational modification (e.g., glycosylation or phosphorylation). Included within this definition are D- and L-amino acids, and mixtures of D- and L-amino acids, as well as polymers comprising D- and L-amino acids, and mixtures of D- and L-amino acids.

[0033] “Amino acids” are referred to herein by either their commonly known three-letter symbols or by the one-letter symbols recommended by IUPAC-IUB Biochemical Nomenclature Commission. Nucleotides, likewise, may be referred to by their commonly accepted single letter codes.

[0034] As used herein, “hydrophilic amino acid or residue” refers to an amino acid or residue having a side chain exhibiting a hydrophobicity of less than zero according to the normalized consensus hydrophobicity scale of Eisenberg et al., (Eisenberg et al., J. Mol. Biol., 179:125-142 [1984]). Genetically encoded hydrophilic amino acids include L-Thr (T), L-Ser (S), L-His (H), L-Glu (E), L-Asn (N), L-Gln (Q), L-Asp (D), L-Lys (K) and L-Arg (R).

[0035] As used herein, “acidic amino acid or residue” refers to a hydrophilic amino acid or residue having a side chain exhibiting a pKa value of less than about 6 when the amino acid is included in a peptide or polypeptide. Acidic amino acids typically have negatively charged side chains at physiological pH due to loss of a hydrogen ion. Genetically encoded acidic amino acids include L-Glu (E) and L-Asp (D).

[0036] As used herein, “basic amino acid or residue” refers to a hydrophilic amino acid or residue having a side chain exhibiting a pKa value of greater than about 6 when the amino acid is included in a peptide or polypeptide. Basic amino acids typically have positively charged side chains at physiological pH due to association with hydronium ion. Genetically encoded basic amino acids include L-Arg (R) and L-Lys (K).

[0037] As used herein, “polar amino acid or residue” refers to a hydrophilic amino acid or residue having a side chain that is uncharged at physiological pH, but which has at least one bond in which the pair of electrons shared in common by two atoms is held more closely by one of the atoms. Genetically encoded polar amino acids include L-Asn (N), L-Gln (Q), L-Ser (S) and L-Thr (T).

[0038] As used herein, “hydrophobic amino acid or residue” refers to an amino acid or residue having a side chain exhibiting a hydrophobicity of greater than zero according to the normalized consensus hydrophobicity scale of Eisenberg et al., (Eisenberg et al., J. Mol. Biol., 179:125-142) [1984]). Genetically encoded hydrophobic amino acids include L-Pro (P), L-Ile (I), L-Phe (F), L-Val (V), L-Leu (L), L-Trp (W), L-Met (M), L-Ala (A) and L-Tyr (Y).

[0039] As used herein, “aromatic amino acid or residue” refers to a hydrophilic or hydrophobic amino acid or residue having a side chain that includes at least one aromatic or heteroaromatic ring. Genetically encoded aromatic amino acids include L-Phe (F), L-Tyr (Y) and L-Trp (W). Although owing to the pKa of its heteroaromatic nitrogen atom L-His (H) it is sometimes classified as a basic residue, or as an aromatic residue as its side chain includes a heteroaromatic ring, herein histidine is classified as a hydrophilic residue or as a “constrained residue” (see below).

[0040] As used herein, “constrained amino acid or residue” refers to an amino acid or residue that has a constrained geometry. Herein, constrained residues include L-Pro (P) and L-His (H). Histidine has a constrained geometry because it has a relatively small imidazole ring. Proline has a constrained geometry because it also has a five membered ring.

[0041] As used herein, “non-polar amino acid or residue” refers to a hydrophobic amino acid or residue having a side chain that is uncharged at physiological pH and which has bonds in which the pair of electrons shared in common by two atoms is generally held equally by each of the two atoms (i.e., the side chain is not polar). Genetically encoded non-polar amino acids include L-Gly (G), L-Leu (L), L-Val (V), L-Ile (I), L-Met (M) and L-Ala (A).

[0042] As used herein, “aliphatic amino acid or residue” refers to a hydrophobic amino acid or residue having an aliphatic hydrocarbon side chain. Genetically encoded aliphatic amino acids include L-Ala (A), L-Val (V), L-Leu (L) and L-Ile (I). It is noted that cysteine (or “L-Cys” or “[C]”) is unusual in that it can form disulfide bridges with other L-Cys (C) amino acids or other sulfanyl- or sulfhydryl-containing amino acids. The “cysteine-like residues” include cysteine and other amino acids that contain sulfhydryl moieties that are available for formation of disulfide bridges. The ability of L-Cys (C) (and other amino acids with —SH containing side chains) to exist in a peptide in either the reduced free —SH or oxidized disulfide-bridged form affects whether L-Cys (C) contributes net hydrophobic or hydrophilic character to a peptide. While L-Cys (C) exhibits a hydrophobicity of 0.29 according to the normalized consensus scale of Eisenberg (Eisenberg et al., 1984, supra), it is to be understood that for purposes of the present disclosure, L-Cys (C) is categorized into its own unique group.

[0043] As used herein, “small amino acid or residue” refers to an amino acid or residue having a side chain that is composed of a total three or fewer carbon and/or heteroatoms (excluding the α-carbon and hydrogens). The small amino acids or residues may be further categorized as aliphatic, non-polar, polar or acidic small amino acids or residues, in accordance with the above definitions. Genetically-encoded small amino acids include L-Ala (A), L-Val (V), L-Cys (C), L-Asn (N), L-Ser (S), L-Thr (T) and L-Asp (D).

[0044] As used herein, “hydroxyl-containing amino acid or residue” refers to an amino acid containing a hydroxyl (—OH) moiety. Genetically-encoded hydroxyl-containing amino acids include L-Ser (S) L-Thr (T) and L-Tyr (Y).

[0045] As used herein, “polynucleotide” and “nucleic acid” refer to two or more nucleotides that are covalently linked together. The polynucleotide may be wholly comprised of ribonucleotides (i.e., RNA), wholly comprised of 2′ deoxyribonucleotides (i.e., DNA), or comprised of mixtures of ribo- and 2′ deoxyribonucleotides. While the nucleosides will typically be linked together via standard phosphodiester linkages, the polynucleotides may include one or more non-standard linkages. The polynucleotide may be single-stranded or double-stranded, or may include both single-stranded regions and double-stranded regions. Moreover, while a polynucleotide will typically be composed of the naturally occurring encoding nucleobases (i.e., adenine, guanine, uracil, thymine and cytosine), it may include one or more modified and/or synthetic nucleobases, such as, for example, inosine, xanthine, hypoxanthine, etc. In some embodiments, such modified or synthetic nucleobases are nucleobases encoding amino acid sequences.

[0046] As used herein, “nucleoside” refers to glycosylamines comprising a nucleobase (i.e., a nitrogenous base), and a 5-carbon sugar (e.g., ribose or deoxyribose). Non-limiting examples of nucleosides include cytidine, uridine, adenosine, guanosine, thymidine, and inosine. In contrast, the term “nucleotide” refers to the glycosylamines comprising a nucleobase, a 5-carbon sugar, and one or more phosphate groups. In some embodiments, nucleosides can be phosphorylated by kinases to produce nucleotides.

[0047] As used herein, “nucleoside diphosphate” refers to glycosylamines comprising a nucleobase (i.e., a nitrogenous base), a 5-carbon sugar (e.g., ribose or deoxyribose), and a diphosphate (i.e., pyrophosphate) moiety. In some embodiments herein, “nucleoside diphosphate” is abbreviated as “NDP.” Non-limiting examples of nucleoside diphosphates include cytidine diphosphate (CDP), uridine diphosphate (UDP), adenosine diphosphate (ADP), guanosine diphosphate (GDP), thymidine diphosphate (TDP), and inosine diphosphate (IDP). The terms “nucleoside” and “nucleotide” may be used interchangeably in some contexts.

[0048] As used herein, “coding sequence” refers to that portion of a nucleic acid (e.g., a gene) that encodes an amino acid sequence of a protein.

[0049] As used herein, the terms “biocatalysis,” “biocatalytic,” “biotransformation,” and “biosynthesis” refer to the use of enzymes to perform chemical reactions on organic compounds.

[0050] As used herein, “wild-type” and “naturally-occurring” refer to the form found in nature. For example, a wild-type polypeptide or polynucleotide sequence is a sequence present in an organism that can be isolated from a source in nature and which has not been intentionally modified by human manipulation.

[0051] As used herein, “recombinant,” “engineered,” “variant,” and “non-naturally occurring” when used with reference to a cell, nucleic acid, or polypeptide, refers to a material, or a material corresponding to the natural or native form of the material, that has been modified in a manner that would not otherwise exist in nature. In some embodiments, the cell, nucleic acid or polypeptide is identical a naturally occurring cell, nucleic acid or polypeptide, but is produced or derived from synthetic materials and/or by manipulation using recombinant techniques. Non-limiting examples include, among others, recombinant cells expressing genes that are not found within the native (non-recombinant) form of the cell or express native genes that are otherwise expressed at a different level.

[0052] The term “percent (%) sequence identity” is used herein to refer to comparisons among polynucleotides or polypeptides, and are determined by comparing two optimally aligned sequences over a comparison window, wherein the portion of the polynucleotide or polypeptide sequence in the comparison window may comprise additions or deletions (i.e., gaps) as compared to the reference sequence for optimal alignment of the two sequences. The percentage may be calculated by determining the number of positions at which the identical nucleic acid base or amino acid residue occurs in both sequences to yield the number of matched positions, dividing the number of matched positions by the total number of positions in the window of comparison and multiplying the result by 100 to yield the percentage of sequence identity. Alternatively, the percentage may be calculated by determining the number of positions at which either the identical nucleic acid base or amino acid residue occurs in both sequences or a nucleic acid base or amino acid residue is aligned with a gap to yield the number of matched positions, dividing the number of matched positions by the total number of positions in the window of comparison and multiplying the result by 100 to yield the percentage of sequence identity. Those of skill in the art appreciate that there are many established algorithms available to align two sequences. Optimal alignment of sequences for comparison can be conducted by any suitable method, including, but not limited to the local homology algorithm of Smith and Waterman (Smith and Waterman, Adv. Appl. Math., 2:482 [1981]), by the homology alignment algorithm of Needleman and Wunsch (Needleman and Wunsch, J. Mol. Biol., 48:443 [1970]), by the search for similarity method of Pearson and Lipman (Pearson and Lipman, Proc. Natl. Acad. Sci. USA 85:2444 [1988]), by computerized implementations of these algorithms (e.g., GAP, BESTFIT, FASTA, and TFASTA in the GCG Wisconsin Software Package), or by visual inspection, as known in the art. Examples of algorithms that are suitable for determining percent sequence identity and sequence similarity include, but are not limited to the BLAST and BLAST 2.0 algorithms, which are described by Altschul et al. (See Altschul et al., J. Mol. Biol., 215: 403-410 [1990]; and Altschul et al., Nucl. Acids Res., 3389-3402 [1977], respectively). Software for performing BLAST analyses is publicly available through the National Center for Biotechnology Information website. This algorithm involves first identifying high scoring sequence pairs (HSPs) by identifying short words of length W in the query sequence, which either match or satisfy some positive-valued threshold score T when aligned with a word of the same length in a database sequence. T is referred to as, the neighborhood word score threshold (See, Altschul et al., supra). These initial neighborhood word hits act as seeds for initiating searches to find longer HSPs containing them. The word hits are then extended in both directions along each sequence for as far as the cumulative alignment score can be increased. Cumulative scores are calculated using, for nucleotide sequences, the parameters M (reward score for a pair of matching residues; always >0) and N (penalty score for mismatching residues; always <0). For amino acid sequences, a scoring matrix is used to calculate the cumulative score. Extension of the word hits in each direction are halted when: the cumulative alignment score falls off by the quantity X from its maximum achieved value; the cumulative score goes to zero or below, due to the accumulation of one or more negative-scoring residue alignments; or the end of either sequence is reached. The BLAST algorithm parameters W, T, and X determine the sensitivity and speed of the alignment. The BLASTN program (for nucleotide sequences) uses as defaults a wordlength (W) of 11, an expectation (E) of 10, M=5, N=−4, and a comparison of both strands. For amino acid sequences, the BLASTP program uses as defaults a word length (W) of 3, an expectation (E) of 10, and the BLOSUM62 scoring matrix (See, Henikoff and Henikoff, Proc. Natl. Acad. Sci. USA 89:10915 [1989]). Exemplary determination of sequence alignment and % sequence identity can employ the BESTFIT or GAP programs in the GCG Wisconsin Software package (Accelrys, Madison WI), using default parameters provided.

[0053] As used herein, “reference sequence” refers to a defined sequence used as a basis for a sequence and/or activity comparison. A reference sequence may be a subset of a larger sequence, for example, a segment of a full-length gene or polypeptide sequence. Generally, a reference sequence is at least 20 nucleotide or amino acid residues in length, at least 25 residues in length, at least 50 residues in length, at least 100 residues in length or the full length of the nucleic acid or polypeptide. Since two polynucleotides or polypeptides may each (1) comprise a sequence (i.e., a portion of the complete sequence) that is similar between the two sequences, and (2) may further comprise a sequence that is divergent between the two sequences, sequence comparisons between two (or more) polynucleotides or polypeptides are typically performed by comparing sequences of the two polynucleotides or polypeptides over a “comparison window” to identify and compare local regions of sequence similarity. In some embodiments, a “reference sequence” can be based on a primary amino acid sequence, where the reference sequence is a sequence that can have one or more changes in the primary sequence.

[0054] As used herein, “comparison window” refers to a conceptual segment of at least about 20 contiguous nucleotide positions or amino acid residues wherein a sequence may be compared to a reference sequence of at least 20 contiguous nucleotides or amino acids and wherein the portion of the sequence in the comparison window may comprise additions or deletions (i.e., gaps) of 20 percent or less as compared to the reference sequence (which does not comprise additions or deletions) for optimal alignment of the two sequences. The comparison window can be longer than 20 contiguous residues, and includes, optionally 30, 40, 50, 100, or longer windows.

[0055] As used herein, “corresponding to,” “reference to,” and “relative to” when used in the context of the numbering of a given amino acid or polynucleotide sequence refer to the numbering of the residues of a specified reference sequence when the given amino acid or polynucleotide sequence is compared to the reference sequence. In other words, the residue number or residue position of a given polymer is designated with respect to the reference sequence rather than by the actual numerical position of the residue within the given amino acid or polynucleotide sequence. For example, a given amino acid sequence, such as that of an engineered pantothenate kinase, can be aligned to a reference sequence by introducing gaps to optimize residue matches between the two sequences. In these cases, although the gaps are present, the numbering of the residue in the given amino acid or polynucleotide sequence is made with respect to the reference sequence to which it has been aligned.

[0056] As used herein, “substantial identity” refers to a polynucleotide or polypeptide sequence that has at least 80 percent sequence identity, at least 85 percent identity, at least between 89 to 95 percent sequence identity, or more usually, at least 99 percent sequence identity as compared to a reference sequence over a comparison window of at least 20 residue positions, frequently over a window of at least 30-50 residues, wherein the percentage of sequence identity is calculated by comparing the reference sequence to a sequence that includes deletions or additions which total 20 percent or less of the reference sequence over the window of comparison. In some specific embodiments applied to polypeptides, the term “substantial identity” means that two polypeptide sequences, when optimally aligned, such as by the programs GAP or BESTFIT using default gap weights, share at least 80 percent sequence identity, preferably at least 89 percent sequence identity, at least 95 percent sequence identity or more (e.g., 99 percent sequence identity). In some embodiments, residue positions that are not identical in sequences being compared differ by conservative amino acid substitutions.

[0057] As used herein, “amino acid difference” and “residue difference” refer to a difference in the amino acid residue at a position of a polypeptide sequence relative to the amino acid residue at a corresponding position in a reference sequence. In some cases, the reference sequence has a histidine tag, but the numbering is maintained relative to the equivalent reference sequence without the histidine tag. The positions of amino acid differences generally are referred to herein as “Xn,” where n refers to the corresponding position in the reference sequence upon which the residue difference is based. For example, a “residue difference at position X93 as compared to SEQ ID NO: 4” refers to a difference of the amino acid residue at the polypeptide position corresponding to position 93 of SEQ ID NO: 4. Thus, if the reference polypeptide of SEQ ID NO: 4 has a serine at position 93, then a “residue difference at position X93 as compared to SEQ ID NO: 4” an amino acid substitution of any residue other than serine at the position of the polypeptide corresponding to position 93 of SEQ ID NO: 4. In most instances herein, the specific amino acid residue difference at a position is indicated as “XnY” where “Xn” specified the corresponding position as described above, and “Y” is the single letter identifier of the amino acid found in the engineered polypeptide (i.e., the different residue than in the reference polypeptide). In some instances (e.g., in the Table presented in the Examples), the present invention also provides specific amino acid differences denoted by the conventional notation “AnB”, where A is the single letter identifier of the residue in the reference sequence, “n” is the number of the residue position in the reference sequence, and B is the single letter identifier of the residue substitution in the sequence of the engineered polypeptide. In some instances, a polypeptide of the present invention can include one or more amino acid residue differences relative to a reference sequence, which is indicated by a list of the specified positions where residue differences are present relative to the reference sequence. In some embodiments, where more than one amino acid can be used in a specific residue position of a polypeptide, the various amino acid residues that can be used are separated by a “I” (e.g., X307H/X307P or X307H/P). The slash may also be used to indicate multiple substitutions within a given variant (i.e., there is more than one substitution present in a given sequence, such as in a combinatorial variant). In some embodiments, the present invention includes engineered polypeptide sequences comprising one or more amino acid differences comprising conservative or non-conservative amino acid substitutions. In some additional embodiments, the present invention provides engineered polypeptide sequences comprising both conservative and non-conservative amino acid substitutions.

[0058] As used herein, “conservative amino acid substitution” refers to a substitution of a residue with a different residue having a similar side chain, and thus typically involves substitution of the amino acid in the polypeptide with amino acids within the same or similar defined class of amino acids. By way of example and not limitation, in some embodiments, an amino acid with an aliphatic side chain is substituted with another aliphatic amino acid (e.g., alanine, valine, leucine, and isoleucine); an amino acid with an hydroxyl side chain is substituted with another amino acid with an hydroxyl side chain (e.g., serine and threonine); an amino acids having aromatic side chains is substituted with another amino acid having an aromatic side chain (e.g., phenylalanine, tyrosine, tryptophan, and histidine); an amino acid with a basic side chain is substituted with another amino acid with a basis side chain (e.g., lysine and arginine); an amino acid with an acidic side chain is substituted with another amino acid with an acidic side chain (e.g., aspartic acid or glutamic acid); and/or a hydrophobic or hydrophilic amino acid is replaced with another hydrophobic or hydrophilic amino acid, respectively.

[0059] As used herein, “non-conservative substitution” refers to substitution of an amino acid in the polypeptide with an amino acid with significantly differing side chain properties. Non-conservative substitutions may use amino acids between, rather than within, the defined groups and affects (a) the structure of the peptide backbone in the area of the substitution (e.g., proline for glycine) (b) the charge or hydrophobicity, or (c) the bulk of the side chain. By way of example and not limitation, an exemplary non-conservative substitution can be an acidic amino acid substituted with a basic or aliphatic amino acid; an aromatic amino acid substituted with a small amino acid; and a hydrophilic amino acid substituted with a hydrophobic amino acid.

[0060] As used herein, “deletion” refers to modification to the polypeptide by removal of one or more amino acids from the reference polypeptide. Deletions can comprise removal of 1 or more amino acids, 2 or more amino acids, 5 or more amino acids, 10 or more amino acids, 15 or more amino acids, or 20 or more amino acids, up to 10% of the total number of amino acids, or up to 20% of the total number of amino acids making up the reference enzyme while retaining enzymatic activity and/or retaining the improved properties of an engineered pantothenate kinase enzyme. Deletions can be directed to the internal portions and/or terminal portions of the polypeptide. In various embodiments, the deletion can comprise a continuous segment or can be discontinuous. Deletions are typically indicated by “-” in amino acid sequences.

[0061] As used herein, “insertion” refers to modification to the polypeptide by addition of one or more amino acids from the reference polypeptide. Insertions can be in the internal portions of the polypeptide, or to the carboxy or amino terminus. Insertions as used herein include fusion proteins as is known in the art. The insertion can be a contiguous segment of amino acids or separated by one or more of the amino acids in the naturally occurring polypeptide.

[0062] The term “amino acid substitution set” or “substitution set” refers to a group of amino acid substitutions in a polypeptide sequence, as compared to a reference sequence. A substitution set can have 1, 2, 3, 4, 5, 6, 7, 8, 9, 10, 11, 12, 13, 14, 15, or more amino acid substitutions. In some embodiments, a substitution set refers to the set of amino acid substitutions that is present in any of the variant pantothenate kinases listed in the Tables provided in the Examples

[0063] A “functional fragment” and “biologically active fragment” are used interchangeably herein to refer to a polypeptide that has an amino-terminal and/or carboxy-terminal deletion(s) and/or internal deletions, but where the remaining amino acid sequence is identical to the corresponding positions in the sequence to which it is being compared (e.g., a full-length engineered pantothenate kinase of the present invention) and that retains substantially all of the activity of the full-length polypeptide.

[0064] As used herein, “isolated polypeptide” refers to a polypeptide which is substantially separated from other contaminants that naturally accompany it (e.g., protein, lipids, and polynucleotides). The term embraces polypeptides which have been removed or purified from their naturally-occurring environment or expression system (e.g., within a host cell or via in vitro synthesis). The recombinant pantothenate kinase polypeptides may be present within a cell, present in the cellular medium, or prepared in various forms, such as lysates or isolated preparations. As such, in some embodiments, the recombinant pantothenate kinase polypeptides can be an isolated polypeptide.

[0065] As used herein, “substantially pure polypeptide” or “purified protein” refers to a composition in which the polypeptide species is the predominant species present (i.e., on a molar or weight basis it is more abundant than any other individual macromolecular species in the composition), and is generally a substantially purified composition when the object species comprises at least about 50 percent of the macromolecular species present by mole or % weight. However, in some embodiments, the composition comprising pantothenate kinase comprises pantothenate kinase that is less than 50% pure (e.g., about 10%, about 20%, about 30%, about 40%, or about 50%) Generally, a substantially pure pantothenate kinase composition comprises about 60% or more, about 70% or more, about 80% or more, about 90% or more, about 95% or more, and about 98% or more of all macromolecular species by mole or % weight present in the composition. In some embodiments, the object species is purified to essential homogeneity (i.e., contaminant species cannot be detected in the composition by conventional detection methods) wherein the composition consists essentially of a single macromolecular species. Solvent species, small molecules (<500 Daltons), and elemental ion species are not considered macromolecular species. In some embodiments, the isolated recombinant pantothenate kinase polypeptides are substantially pure polypeptide compositions.

[0066] As used herein, “improved enzyme property” refers to at least one improved property of an enzyme. In some embodiments, the present invention provides engineered pantothenate kinase polypeptides that exhibit an improvement in any enzyme property as compared to a reference pantothenate kinase polypeptide and/or a wild-type pantothenate kinase polypeptide, and/or another engineered pantothenate kinase polypeptide. Thus, the level of “improvement” can be determined and compared between various pantothenate kinase polypeptides, including wild-type, as well as engineered pantothenate kinases. Improved properties include, but are not limited, to such properties as increased protein expression, increased thermoactivity, increased thermostability, increased pH activity, increased stability, increased enzymatic activity, increased substrate specificity or affinity, increased specific activity, increased resistance to substrate or end-product inhibition, increased chemical stability, improved chemoselectivity, improved solvent stability, increased tolerance to acidic pH, increased tolerance to proteolytic activity (i.e., reduced sensitivity to proteolysis), reduced aggregation, increased solubility, and altered temperature profile. In additional embodiments, the term is used in reference to the at least one improved property of pantothenate kinase enzymes. In some embodiments, the present invention provides engineered pantothenate kinase polypeptides that exhibit an improvement in any enzyme property as compared to a reference pantothenate kinase polypeptide and/or a wild-type pantothenate kinase polypeptide, and/or another engineered pantothenate kinase polypeptide. Thus, the level of “improvement” can be determined and compared between various pantothenate kinase polypeptides, including wild-type, as well as engineered pantothenate kinases.

[0067] As used herein, “increased enzymatic activity” and “enhanced catalytic activity” refer to an improved property of the engineered polypeptides, which can be represented by an increase in specific activity (e.g., product produced/time/weight protein) or an increase in percent conversion of the substrate to the product (e.g., percent conversion of starting amount of substrate to product in a specified time period using a specified amount of enzyme) as compared to the reference enzyme. In some embodiments, the terms refer to an improved property of engineered pantothenate kinase polypeptides provided herein, which can be represented by an increase in specific activity (e.g., product produced/time/weight protein) or an increase in percent conversion of the substrate to the product (e.g., percent conversion of starting amount of substrate to product in a specified time period using a specified amount of pantothenate kinase) as compared to the reference pantothenate kinase enzyme. In some embodiments, the terms are used in reference to improved pantothenate kinase enzymes provided herein. Exemplary methods to determine enzyme activity of the engineered pantothenate kinases of the present invention are provided in the Examples. Any property relating to enzyme activity may be affected, including the classical enzyme properties of Km, Vmax or kcat, changes of which can lead to increased enzymatic activity. For example, improvements in enzyme activity can be from about 1.1 fold the enzymatic activity of the corresponding wild-type enzyme, to as much as 2-fold, 5-fold, 10-fold, 20-fold, 25-fold, 50-fold, 75-fold, 100-fold, 150-fold, 200-fold or more enzymatic activity than the naturally occurring pantothenate kinase or another engineered pantothenate kinase from which the pantothenate kinase polypeptides were derived.

[0068] As used herein, “conversion” refers to the enzymatic conversion (or biotransformation) of a substrate(s) to the corresponding product(s). “Percent conversion” refers to the percent of the substrate that is converted to the product within a period of time under specified conditions. Thus, the “enzymatic activity” or “activity” of a pantothenate kinase polypeptide can be expressed as “percent conversion” of the substrate to the product in a specific period of time.

[0069] Enzymes with “generalist properties” (or “generalist enzymes”) refer to enzymes that exhibit improved activity for a wide range of substrates, as compared to a parental sequence. Generalist enzymes do not necessarily demonstrate improved activity for every possible substrate. In some embodiments, the present invention provides pantothenate kinase variants with generalist properties, in that they demonstrate similar or improved activity relative to the parental gene for a wide range of sterically and electronically diverse substrates. In addition, the generalist enzymes provided herein were engineered to be improved across a wide range of diverse molecules to increase the production of metabolites/products.

[0070] The term “stringent hybridization conditions” is used herein to refer to conditions under which nucleic acid hybrids are stable. As known to those of skill in the art, the stability of hybrids is reflected in the melting temperature (Tm) of the hybrids. In general, the stability of a hybrid is a function of ion strength, temperature, G/C content, and the presence of chaotropic agents. The Tm values for polynucleotides can be calculated using known methods for predicting melting temperatures (See e.g., Baldino et al., Meth. Enzymol., 168:761-777 [1989]; Bolton et al., Proc. Natl. Acad. Sci. USA 48:1390 [1962]; Bresslauer et al., Proc. Natl. Acad. Sci. USA 83:8893-8897 [1986]; Freier et al., Proc. Natl. Acad. Sci. USA 83:9373-9377 [1986]; Kierzek et al., Biochem., 25:7840-7846 [1986]; Rychlik et al., Nucl. Acids Res., 18:6409-6412 (erratum, Nucl. Acids Res., 19:698 [1991]); Sambrook et al., supra); Suggs et al., 1981, in Developmental Biology Using Purified Genes, Brown et al. [eds.], pp. 683-693, Academic Press, Cambridge, MA [1981]; and Wetmur, Crit. Rev. Biochem. Mol. Biol. 26:227-259 [1991]). In some embodiments, the polynucleotide encodes the polypeptide disclosed herein and hybridizes under defined conditions, such as moderately stringent or highly stringent conditions, to the complement of a sequence encoding an engineered pantothenate kinase enzyme of the present invention.

[0071] As used herein, “hybridization stringency” relates to hybridization conditions, such as washing conditions, in the hybridization of nucleic acids. Generally, hybridization reactions are performed under conditions of lower stringency, followed by washes of varying but higher stringency. The term “moderately stringent hybridization” refers to conditions that permit target-DNA to bind a complementary nucleic acid that has about 60% identity, preferably about 75% identity, about 85% identity to the target DNA, with greater than about 90% identity to target-polynucleotide. Exemplary moderately stringent conditions are conditions equivalent to hybridization in 50% formamide, 5× Denhart's solution, 5×SSPE, 0.2% SDS at 42° C., followed by washing in 0.2×SSPE, 0.2% SDS, at 42° C. “High stringency hybridization” refers generally to conditions that are about 10° C. or less from the thermal melting temperature Tm as determined under the solution condition for a defined polynucleotide sequence. In some embodiments, a high stringency condition refers to conditions that permit hybridization of only those nucleic acid sequences that form stable hybrids in 0.018M NaCl at 65° C. (i.e., if a hybrid is not stable in 0.018M NaCl at 65° C., it will not be stable under high stringency conditions, as contemplated herein). High stringency conditions can be provided, for example, by hybridization in conditions equivalent to 50% formamide, 5× Denhart's solution, 5×SSPE, 0.2% SDS at 42° C., followed by washing in 0.1×SSPE, and 0.1% SDS at 65° C. Another high stringency condition is hybridizing in conditions equivalent to hybridizing in 5×SSC containing 0.1% (w/v) SDS at 65° C. and washing in 0.1×SSC containing 0.1% SDS at 65° C. Other high stringency hybridization conditions, as well as moderately stringent conditions, are described in the references cited above.

[0072] As used herein, “codon optimized” refers to changes in the codons of the polynucleotide encoding a protein to those preferentially used in a particular organism such that the encoded protein is efficiently expressed in the organism of interest. Although the genetic code is degenerate in that most amino acids are represented by several codons, called “synonyms” or “synonymous” codons, it is well known that codon usage by particular organisms is nonrandom and biased towards particular codon triplets. This codon usage bias may be higher in reference to a given gene, genes of common function or ancestral origin, highly expressed proteins versus low copy number proteins, and the aggregate protein coding regions of an organism's genome. In some embodiments, the polynucleotides encoding the pantothenate kinase enzymes may be codon optimized for optimal production in the host organism selected for expression.

[0073] As used herein, “preferred,” “optimal,” and “high codon usage bias” codons when used alone or in combination refer(s) interchangeably to codons that are used at higher frequency in the protein coding regions than other codons that code for the same amino acid. The preferred codons may be determined in relation to codon usage in a single gene, a set of genes of common function or origin, highly expressed genes, the codon frequency in the aggregate protein coding regions of the whole organism, codon frequency in the aggregate protein coding regions of related organisms, or combinations thereof. Codons whose frequency increases with the level of gene expression are typically optimal codons for expression. A variety of methods are known for determining the codon frequency (e.g., codon usage, relative synonymous codon usage) and codon preference in specific organisms, including multivariate analysis, for example, using cluster analysis or correspondence analysis, and the effective number of codons used in a gene (See e.g., GCG CodonPreference, Genetics Computer Group Wisconsin Package; CodonW, Peden, University of Nottingham; McInerney, Bioinform., 14:372-73 [1998]; Stenico et al., Nucl. Acids Res., 222437-46 [1994]; and Wright, Gene 87:23-29 [1990]). Codon usage tables are available for many different organisms (See e.g., Wada et al., Nucl. Acids Res., 20:2111-2118 [1992]; Nakamura et al., Nucl. Acids Res., 28:292 [2000]; Duret, et al., supra; Henaut and Danchin, in Escherichia coli and Salmonella, Neidhardt, et al. (eds.), ASM Press, Washington D.C., p. 2047-2066 [1996]). The data source for obtaining codon usage may rely on any available nucleotide sequence capable of coding for a protein. These data sets include nucleic acid sequences actually known to encode expressed proteins (e.g., complete protein coding sequences-CDS), expressed sequence tags (ESTS), or predicted coding regions of genomic sequences (See e.g., Mount, Bioinformatics: Sequence and Genome Analysis, Chapter 8, Cold Spring Harbor Laboratory Press, Cold Spring Harbor, N.Y. [2001]; Uberbacher, Meth. Enzymol., 266:259-281 [1996]; and Tiwari et al., Comput. Appl. Biosci., 13:263-270 [1997]).

[0074] As used herein, “control sequence” includes all components, which are necessary or advantageous for the expression of a polynucleotide and/or polypeptide of the present invention. Each control sequence may be native or foreign to the nucleic acid sequence encoding the polypeptide. Such control sequences include, but are not limited to, a leader, polyadenylation sequence, propeptide sequence, promoter sequence, signal peptide sequence, initiation sequence and transcription terminator. At a minimum, the control sequences include a promoter, and transcriptional and translational stop signals. The control sequences may be provided with linkers for the purpose of introducing specific restriction sites facilitating ligation of the control sequences with the coding region of the nucleic acid sequence encoding a polypeptide.

[0075] “Operably linked” is defined herein as a configuration in which a control sequence is appropriately placed (i.e., in a functional relationship) at a position relative to a polynucleotide of interest such that the control sequence directs or regulates the expression of the polynucleotide and/or polypeptide of interest.

[0076] “Promoter sequence” refers to a nucleic acid sequence that is recognized by a host cell for expression of a polynucleotide of interest, such as a coding sequence. The promoter sequence contains transcriptional control sequences, which mediate the expression of a polynucleotide of interest. The promoter may be any nucleic acid sequence which shows transcriptional activity in the host cell of choice including mutant, truncated, and hybrid promoters, and may be obtained from genes encoding extracellular or intracellular polypeptides either homologous or heterologous to the host cell.

[0077] The phrase “suitable reaction conditions” refers to those conditions in the enzymatic conversion reaction solution (e.g., ranges of enzyme loading, substrate loading, temperature, pH, buffers, co-solvents, etc.) under which a pantothenate kinase polypeptide of the present invention is capable of converting a substrate to the desired product compound. Some exemplary “suitable reaction conditions” are provided herein.

[0078] As used herein, “loading,” such as in “compound loading” or “enzyme loading” refers to the concentration or amount of a component in a reaction mixture at the start of the reaction.

[0079] As used herein, “substrate” in the context of an enzymatic conversion reaction process refers to the compound or molecule acted on by the engineered enzymes provided herein (e.g., engineered pantothenate kinase polypeptides).

[0080] As used herein, “increasing” yield of a product (e.g., a deoxyribose phosphate analog) from a reaction occurs when a particular component present during the reaction (e.g., a pantothenate kinase enzyme) causes more product to be produced, compared with a reaction conducted under the same conditions with the same substrate and other substituents, but in the absence of the component of interest.

[0081] A reaction is said to be “substantially free” of a particular enzyme if the amount of that enzyme compared with other enzymes that participate in catalyzing the reaction is less than about 2%, about 1%, or about 0.1% (wt/wt).

[0082] As used herein, “fractionating” a liquid (e.g., a culture broth) means applying a separation process (e.g., salt precipitation, column chromatography, size exclusion, and filtration) or a combination of such processes to provide a solution in which a desired protein comprises a greater percentage of total protein in the solution than in the initial liquid product.

[0083] As used herein, “starting composition” refers to any composition that comprises at least one substrate. In some embodiments, the starting composition comprises any suitable substrate.

[0084] As used herein, “product” in the context of an enzymatic conversion process refers to the compound or molecule resulting from the action of an enzymatic polypeptide on a substrate.

[0085] As used herein, “equilibration” as used herein refers to the process resulting in a steady state concentration of chemical species in a chemical or enzymatic reaction (e.g., interconversion of two species A and B), including interconversion of stereoisomers, as determined by the forward rate constant and the reverse rate constant of the chemical or enzymatic reaction.

[0086] As used herein, “alkyl” refers to saturated hydrocarbon groups of from 1 to 18 carbon atoms inclusively, either straight chained or branched, more preferably from 1 to 8 carbon atoms inclusively, and most preferably 1 to 6 carbon atoms inclusively. An alkyl with a specified number of carbon atoms is denoted in parenthesis (e.g., (C1-C4)alkyl refers to an alkyl of 1 to 4 carbon atoms).

[0087] As used herein, “alkenyl” refers to groups of from 2 to 12 carbon atoms inclusively, either straight or branched containing at least one double bond but optionally containing more than one double bond.

[0088] As used herein, “alkynyl” refers to groups of from 2 to 12 carbon atoms inclusively, either straight or branched containing at least one triple bond but optionally containing more than one triple bond, and additionally optionally containing one or more double bonded moieties.

[0089] As used herein, “heteroalkyl, “heteroalkenyl,” and heteroalkynyl,” refer to alkyl, alkenyl and alkynyl as defined herein in which one or more of the carbon atoms are each independently replaced with the same or different heteroatoms or heteroatomic groups. Heteroatoms and/or heteroatomic groups which can replace the carbon atoms include, but are not limited to, —O—, —S—, —S—O—, —NRa—, —PH—, —S(O)—, —S(O)₂, —S(O) NRα-, —S(O)₂NRα-, and the like, including combinations thereof, where each Rα is independently selected from hydrogen, alkyl, heteroalkyl, cycloalkyl, heterocycloalkyl, aryl, and heteroaryl.

[0090] As used herein, “alkoxy” refers to the group —ORO wherein R is an alkyl group is as defined above including optionally substituted alkyl groups as also defined herein.

[0091] As used herein, “aryl” refers to an unsaturated aromatic carbocyclic group of from 6 to 12 carbon atoms inclusively having a single ring (e.g., phenyl) or multiple condensed rings (e.g., naphthyl or anthryl). Exemplary aryls include phenyl, pyridyl, naphthyl and the like.

[0092] As used herein, “amino” refers to the group —NH₂. Substituted amino refers to the group —NHRδ, NRδRδ, and NRδRδRδ, where each Rδ is independently selected from substituted or unsubstituted alkyl, cycloalkyl, cycloheteroalkyl, alkoxy, aryl, heteroaryl, heteroarylalkyl, acyl, alkoxycarbonyl, sulfanyl, sulfinyl, sulfonyl, and the like. Typical amino groups include, but are limited to, dimethylamino, diethylamino, trimethylammonium, triethylammonium, methylysulfonylamino, furanyl-oxy-sulfamino, and the like.

[0093] As used herein, “oxo” refers to ═O.

[0094] As used herein, “oxy” refers to a divalent group —O—, which may have various substituents to form different oxy groups, including ethers and esters.

[0095] As used herein, “carboxy” refers to —COOH.

[0096] As used herein, “carbonyl” refers to —C(O)—, which may have a variety of substituents to form different carbonyl groups including acids, acid halides, aldehydes, amides, esters, and ketones.

[0097] As used herein, “alkyloxycarbonyl” refers to —C(O)ORε, where Rε is an alkyl group as defined herein, which can be optionally substituted.

[0098] As used herein, “aminocarbonyl” refers to —C(O)NH₂. Substituted aminocarbonyl refers to —C(O)NRδRδ, where the amino group NRδRδ is as defined herein.

[0099] As used herein, “halogen” and “halo” refer to fluoro, chloro, bromo and iodo.

[0100] As used herein, “hydroxy” refers to —OH.

[0101] As used herein, “cyano” refers to —CN.

[0102] As used herein, “heteroaryl” refers to an aromatic heterocyclic group of from 1 to 10 carbon atoms inclusively and 1 to 4 heteroatoms inclusively selected from oxygen, nitrogen and sulfur within the ring. Such heteroaryl groups can have a single ring (e.g., pyridyl or furyl) or multiple condensed rings (e.g., indolizinyl or benzothienyl).

[0103] As used herein, “heteroarylalkyl” refers to an alkyl substituted with a heteroaryl (i.e., heteroaryl-alkyl-groups), preferably having from 1 to 6 carbon atoms inclusively in the alkyl moiety and from 5 to 12 ring atoms inclusively in the heteroaryl moiety. Such heteroarylalkyl groups are exemplified by pyridylmethyl and the like.

[0104] As used herein, “heteroarylalkenyl” refers to an alkenyl substituted with a heteroaryl (i.e., heteroaryl-alkenyl-groups), preferably having from 2 to 6 carbon atoms inclusively in the alkenyl moiety and from 5 to 12 ring atoms inclusively in the heteroaryl moiety.

[0105] As used herein, “heteroarylalkynyl” refers to an alkynyl substituted with a heteroaryl (i.e., heteroaryl-alkynyl-groups), preferably having from 2 to 6 carbon atoms inclusively in the alkynyl moiety and from 5 to 12 ring atoms inclusively in the heteroaryl moiety.

[0106] As used herein, “heterocycle,” “heterocyclic,” and interchangeably “heterocycloalkyl,” refer to a saturated or unsaturated group having a single ring or multiple condensed rings, from 2 to 10 carbon ring atoms inclusively and from 1 to 4 hetero ring atoms inclusively selected from nitrogen, sulfur or oxygen within the ring. Such heterocyclic groups can have a single ring (e.g., piperidinyl or tetrahydrofuryl) or multiple condensed rings (e.g., indolinyl, dihydrobenzofuran or quinuclidinyl). Examples of heterocycles include, but are not limited to, furan, thiophene, thiazole, oxazole, pyrrole, imidazole, pyrazole, pyridine, pyrazine, pyrimidine, pyridazine, indolizine, isoindole, indole, indazole, purine, quinolizine, isoquinoline, quinoline, phthalazine, naphthylpyridine, quinoxaline, quinazoline, cinnoline, pteridine, carbazole, carboline, phenanthridine, acridine, phenanthroline, isothiazole, phenazine, isoxazole, phenoxazine, phenothiazine, imidazolidine, imidazoline, piperidine, piperazine, pyrrolidine, indoline and the like.

[0107] As used herein, “membered ring” is meant to embrace any cyclic structure. The number preceding the term “membered” denotes the number of skeletal atoms that constitute the ring. Thus, for example, cyclohexyl, pyridine, pyran and thiopyran are 6-membered rings and cyclopentyl, pyrrole, furan, and thiophene are 5-membered rings.

[0108] Unless otherwise specified, positions occupied by hydrogen in the foregoing groups can be further substituted with substituents exemplified by, but not limited to, hydroxy, oxo, nitro, methoxy, ethoxy, alkoxy, substituted alkoxy, trifluoromethoxy, haloalkoxy, fluoro, chloro, bromo, iodo, halo, methyl, ethyl, propyl, butyl, alkyl, alkenyl, alkynyl, substituted alkyl, trifluoromethyl, haloalkyl, hydroxyalkyl, alkoxyalkyl, thio, alkylthio, acyl, carboxy, alkoxycarbonyl, carboxamido, substituted carboxamido, alkylsulfonyl, alkylsulfinyl, alkylsulfonylamino, sulfonamido, substituted sulfonamido, cyano, amino, substituted amino, alkylamino, dialkylamino, aminoalkyl, acylamino, amidino, amidoximo, hydroxamoyl, phenyl, aryl, substituted aryl, aryloxy, arylalkyl, arylalkenyl, arylalkynyl, pyridyl, imidazolyl, heteroaryl, substituted heteroaryl, heteroaryloxy, heteroarylalkyl, heteroarylalkenyl, heteroarylalkynyl, cyclopropyl, cyclobutyl, cyclopentyl, cyclohexyl, cycloalkyl, cycloalkenyl, cycloalkylalkyl, substituted cycloalkyl, cycloalkyloxy, pyrrolidinyl, piperidinyl, morpholino, heterocycle, (heterocycle)oxy, and (heterocycle)alkyl; and preferred heteroatoms are oxygen, nitrogen, and sulfur. It is understood that where open valences exist on these substituents they can be further substituted with alkyl, cycloalkyl, aryl, heteroaryl, and/or heterocycle groups, that where these open valences exist on carbon they can be further substituted by halogen and by oxygen-, nitrogen-, or sulfur-bonded substituents, and where multiple such open valences exist, these groups can be joined to form a ring, either by direct formation of a bond or by formation of bonds to a new heteroatom, preferably oxygen, nitrogen, or sulfur. It is further understood that the above substitutions can be made provided that replacing the hydrogen with the substituent does not introduce unacceptable instability to the molecules of the present invention, and is otherwise chemically reasonable.

[0109] As used herein the term “culturing” refers to the growing of a population of microbial cells under any suitable conditions (e.g., using a liquid, gel or solid medium).

[0110] Recombinant polypeptides can be produced using any suitable methods known in the art. Genes encoding the wild-type polypeptide of interest can be cloned in vectors, such as plasmids, and expressed in desired hosts, such as E. coli, etc. Variants of recombinant polypeptides can be generated by various methods known in the art. Indeed, there is a wide variety of different mutagenesis techniques well known to those skilled in the art. In addition, mutagenesis kits are also available from many commercial molecular biology suppliers. Methods are available to make specific substitutions at defined amino acids (site-directed), specific or random mutations in a localized region of the gene (regio-specific), or random mutagenesis over the entire gene (e.g., saturation mutagenesis). Numerous suitable methods are known to those in the art to generate enzyme variants, including but not limited to site-directed mutagenesis of single-stranded DNA or double-stranded DNA using PCR, cassette mutagenesis, gene synthesis, error-prone PCR, shuffling, and chemical saturation mutagenesis, or any other suitable method known in the art. Mutagenesis and directed evolution methods can be readily applied to enzyme-encoding polynucleotides to generate variant libraries that can be expressed, screened, and assayed. Any suitable mutagenesis and directed evolution methods find use in the present invention and are well known in the art (See e.g., U.S. Pat. Nos. 5,605,793, 5,830,721, 5,834,252, 5,837,458, 5,928,905, 6,096,548, 6,117,679, 6,132,970, 6,165,793, 6,180,406, 6,251,674, 6,265,201, 6,277,638, 6,287,861, 6,287,862, 6,291,242, 6,297,053, 6,303,344, 6,309,883, 6,319,713, 6,319,714, 6,323,030, 6,326,204, 6,335,160, 6,335,198, 6,344,356, 6,352,859, 6,355,484, 6,358,740, 6,358,742, 6,365,377, 6,365,408, 6,368,861, 6,372,497, 6,337,186, 6,376,246, 6,379,964, 6,387,702, 6,391,552, 6,391,640, 6,395,547, 6,406,855, 6,406,910, 6,413,745, 6,413,774, 6,420,175, 6,423,542, 6,426,224, 6,436,675, 6,444,468, 6,455,253, 6,479,652, 6,482,647, 6,483,011, 6,484,105, 6,489,146, 6,500,617, 6,500,639, 6,506,602, 6,506,603, 6,518,065, 6,519,065, 6,521,453, 6,528,311, 6,537,746, 6,573,098, 6,576,467, 6,579,678, 6,586,182, 6,602,986, 6,605,430, 6,613,514, 6,653,072, 6,686,515, 6,703,240, 6,716,631, 6,825,001, 6,902,922, 6,917,882, 6,946,296, 6,961,664, 6,995,017, 7,024,312, 7,058,515, 7,105,297, 7,148,054, 7,220,566, 7,288,375, 7,384,387, 7,421,347, 7,430,477, 7,462,469, 7,534,564, 7,620,500, 7,620,502, 7,629,170, 7,702,464, 7,747,391, 7,747,393, 7,751,986, 7,776,598, 7,783,428, 7,795,030, 7,853,410, 7,868,138, 7,783,428, 7,873,477, 7,873,499, 7,904,249, 7,957,912, 7,981,614, 8,014,961, 8,029,988, 8,048,674, 8,058,001, 8,076,138, 8,108,150, 8,170,806, 8,224,580, 8,377,681, 8,383,346, 8,457,903, 8,504,498, 8,589,085, 8,762,066, 8,768,871, 9,593,326, and all related US, as well as PCT and non-US counterparts; Ling et al., Anal. Biochem., 254(2):157-78 [1997]; Dale et al., Meth. Mol. Biol., 57:369-74 [1996]; Smith, Ann. Rev. Genet., 19:423-462 [1985]; Botstein et al., Science, 229:1193-1201 [1985]; Carter, Biochem. J., 237:1-7; Kramer et al., Cell, 38:879-887 [1984]; Wells et al., Gene, 34:315-323 [1985]; Minshull et al., Curr. Op. Chem. Biol., 3:284-290 [1999]; Christians et al., Nat. Biotechnol., 17:259-264 [1999]; Crameri et al., Nature, 391:288-291 [1998]; Crameri, et al., Nat. Biotechnol., 15:436-438 [1997]; Zhang et al., Proc. Nat. Acad. Sci. U.S.A., 94:4504-4509 [1997]; Crameri et al., Nat. Biotechnol., 14:315-319 [1996]; Stemmer, Nature, 370:389-391 [1994]; Stemmer, Proc. Nat. Acad. Sci. USA, 91:10747-10751 [1994]; WO 95/22625; WO 97/0078; WO 97/35966; WO 98/27230; WO 00/42651; WO 01/75767; and WO 2009/152336, all of which are incorporated herein by reference).

[0111] In some embodiments, the enzyme clones obtained following mutagenesis treatment are screened by subjecting the enzyme preparations to a defined temperature (or other assay conditions) and measuring the amount of enzyme activity remaining after heat treatments or other suitable assay conditions. Clones containing a polynucleotide encoding a polypeptide are then isolated from the gene, sequenced to identify the nucleotide sequence changes (if any), and used to express the enzyme in a host cell. Measuring enzyme activity from the expression libraries can be performed using any suitable method known in the art (e.g., standard biochemistry techniques, such as HPLC analysis).

[0112] After the variants are produced, they can be screened for any desired property (e.g., high or increased activity, or low or reduced activity, increased thermal activity, increased thermal stability, and/or acidic pH stability, etc.). In some embodiments, “recombinant pantothenate kinase polypeptides” (also referred to herein as “engineered pantothenate kinase polypeptides,” “variant pantothenate kinase enzymes,” “pantothenate kinase variants,” and “pantothenate kinase combinatorial variants”) find use. In some embodiments, “recombinant pantothenate kinase polypeptides” (also referred to as “engineered pantothenate kinase polypeptides,” “variant pantothenate kinase enzymes,” “pantothenate kinase variants,” and “pantothenate kinase combinatorial variants”) find use.

[0113] As used herein, a “vector” is a DNA construct for introducing a DNA sequence into a cell. In some embodiments, the vector is an expression vector that is operably linked to a suitable control sequence capable of effecting the expression in a suitable host of the polypeptide encoded in the DNA sequence. In some embodiments, an “expression vector” has a promoter sequence operably linked to the DNA sequence (e.g., transgene) to drive expression in a host cell, and in some embodiments, also comprises a transcription terminator sequence.

[0114] As used herein, the term “expression” includes any step involved in the production of the polypeptide including, but not limited to, transcription, post-transcriptional modification, translation, and post-translational modification. In some embodiments, the term also encompasses secretion of the polypeptide from a cell.

[0115] As used herein, the term “produces” refers to the production of proteins and/or other compounds by cells. It is intended that the term encompass any step involved in the production of polypeptides including, but not limited to, transcription, post-transcriptional modification, translation, and post-translational modification. In some embodiments, the term also encompasses secretion of the polypeptide from a cell.

[0116] As used herein, an amino acid or nucleotide sequence (e.g., a promoter sequence, signal peptide, terminator sequence, etc.) is “heterologous” to another sequence with which it is operably linked if the two sequences are not associated in nature. For example a “heterologous polynucleotide” is any polynucleotide that is introduced into a host cell by laboratory techniques, and includes polynucleotides that are removed from a host cell, subjected to laboratory manipulation, and then reintroduced into a host cell.

[0117] As used herein, the terms “host cell” and “host strain” refer to suitable hosts for expression vectors comprising DNA provided herein (e.g., the polynucleotides encoding the pantothenate kinase variants). In some embodiments, the host cells are prokaryotic or eukaryotic cells that have been transformed or transfected with vectors constructed using recombinant DNA techniques as known in the art.

[0118] The term “analogue” means a polypeptide having more than 70% sequence identity but less than 100% sequence identity (e.g., more than 75%, 78%, 80%, 83%, 85%, 88%, 90%, 91%, 92%, 93%, 94%, 95%, 96%, 97%, 98%, 99% sequence identity) with a reference polypeptide. In some embodiments, analogues means polypeptides that contain one or more non-naturally occurring amino acid residues including, but not limited, to homoarginine, ornithine and norvaline, as well as naturally occurring amino acids. In some embodiments, analogues also include one or more D-amino acid residues and non-peptide linkages between two or more amino acid residues.

[0119] The term “effective amount” means an amount sufficient to produce the desired result. One of general skill in the art may determine what the effective amount by using routine experimentation.

[0120] The terms “isolated” and “purified” are used to refer to a molecule (e.g., an isolated nucleic acid, polypeptide, etc.) or other component that is removed from at least one other component with which it is naturally associated. The term “purified” does not require absolute purity, rather it is intended as a relative definition.

[0121] As used herein, “stereoselectivity” refers to the preferential formation in a chemical or enzymatic reaction of one stereoisomer over another. Stereoselectivity can be partial, where the formation of one stereoisomer is favored over the other, or it may be complete where only one stereoisomer is formed. When the stereoisomers are enantiomers, the stereoselectivity is referred to as enantioselectivity, the fraction (typically reported as a percentage) of one enantiomer in the sum of both. It is commonly alternatively reported in the art (typically as a percentage) as the enantiomeric excess (“e.e.”) calculated therefrom according to the formula [major enantiomer−minor enantiomer]/[major enantiomer+minor enantiomer]. Where the stereoisomers are diastereoisomers, the stereoselectivity is referred to as diastereoselectivity, the fraction (typically reported as a percentage) of one diastereomer in a mixture of two diastereomers, commonly alternatively reported as the diastereomeric excess (“d.e.”). Enantiomeric excess and diastereomeric excess are types of stereomeric excess.

[0122] As used herein, “regioselectivity” and “regioselective reaction” refer to a reaction in which one direction of bond making or breaking occurs preferentially over all other possible directions. Reactions can completely (100%) regioselective if the discrimination is complete, substantially regioselective (at least 75%), or partially regioselective (x %, wherein the percentage is set dependent upon the reaction of interest), if the product of reaction at one site predominates over the product of reaction at other sites.

[0123] As used herein, “chemoselectivity” refers to the preferential formation in a chemical or enzymatic reaction of one product over another.

[0124] As used herein, “pH stable” refers to a pantothenate kinase polypeptide that maintains similar activity (e.g., more than 60% to 80%) after exposure to high or low pH (e.g., 4.5-6 or 8 to 12) for a period of time (e.g., 0.5-24 hrs) compared to the untreated enzyme.

[0125] As used herein, “thermostable” refers to a pantothenate kinase polypeptide that maintains similar activity (more than 60% to 80% for example) after exposure to elevated temperatures (e.g., 40-80° C.) for a period of time (e.g., 0.5-24 h) compared to the wild-type enzyme exposed to the same elevated temperature.

[0126] As used herein, “solvent stable” refers to a pantothenate kinase polypeptide that maintains similar activity (more than e.g., 60% to 80%) after exposure to varying concentrations (e.g., 5-99%) of solvent (ethanol, isopropyl alcohol, dimethylsulfoxide [DMSO], tetrahydrofuran, 2-methyltetrahydrofuran, acetone, toluene, butyl acetate, methyl tert-butyl ether, etc.) for a period of time (e.g., 0.5-24 h) compared to the wild-type enzyme exposed to the same concentration of the same solvent.

[0127] As used herein, “thermo- and solvent stable” refers to a pantothenate kinase polypeptide that is both thermostable and solvent stable.

[0128] As used herein, “optional” and “optionally” mean that the subsequently described event or circumstance may or may not occur, and that the description includes instances where the event or circumstance occurs and instances in which it does not. One of ordinary skill in the art would understand that with respect to any molecule described as containing one or more optional substituents, only sterically practical and/or synthetically feasible compounds are meant to be included.

[0129] As used herein, “optionally substituted” refers to all subsequent modifiers in a term or series of chemical groups. For example, in the term “optionally substituted arylalkyl, the “alkyl” portion and the “aryl” portion of the molecule may or may not be substituted, and for the series “optionally substituted alkyl, cycloalkyl, aryl and heteroaryl,” the alkyl, cycloalkyl, aryl, and heteroaryl groups, independently of the others, may or may not be substituted.

### DETAILED DESCRIPTION OF THE INVENTION

[0130] The present invention provides engineered pantothenate kinase (PanK) enzymes, polypeptides having PanK activity, and the polynucleotides encoding these enzymes, as well as the vectors and host cells comprising these polynucleotides and polypeptides. Methods for producing PanK enzymes are also provided. The present invention further provides compositions comprising the PanK enzymes and methods of using the engineered PanK enzymes. The present invention finds particular use in the production of pharmaceutical compounds.

[0131] In some embodiments, the present invention provides enzymes suitable for the production of phosphorylated glycerol derivatives and glyceraldehyde derivatives with bulky substituents on the C2 carbon of glycerol, especially phosphorylated ethynyl-glycerols and ethynyl-glyceraldehydes that are intermediates for the in vitro enzymatic synthesis of the non-natural nucleoside analog shown of compound (1).

[chemical structure]

[0132] Production of phosphorylated glyceraldehyde derivatives such as compound (5), can be difficult. However, the corresponding non-phosphorylated glyceraldehyde derivatives (6) can be made by oxidizing the glycerol derivative (7) with an alcohol oxidase. Once the glycerol aldehyde is formed it can be phosphorylated into the desired intermediate (5) by PanK as shown in Scheme I.

[chemical structure]

[0133] Alternate methods of producing compound (5) may have advantages in the efficient production of compound (1) at industrial scale. PanK enzymes, including the improved enzymes of the present disclosure, may have improved phosphorylation activity on the triglycerol of compound (7) as compared to the glyceraldehyde of compound (6). Thus, producing compound (5) from compound (7) by first phosphorylating compound (7) using a PanK enzyme to produce compound (8) and then oxidizing to compound (5) using an alcohol oxidase may improve production of compound (1) (see Scheme 2, below). Phosphorylation of compound (7) prior to oxidation by the alcohol oxidase may also allow coupling of the oxidase and aldose reactions may reduce product inhibition and increase enzyme efficiency.

[chemical structure]

### Engineered PanK Polypeptides

[0134] The present invention provides engineered PanK polypeptides, polynucleotides encoding the polypeptides, methods of preparing the polypeptides, and methods for using the polypeptides. Where the description relates to polypeptides, it is to be understood that it also describes the polynucleotides encoding the polypeptides. In some embodiments, the present invention provides engineered, non-naturally occurring PanK enzymes with improved properties as compared to wild-type PanK enzymes. Any suitable reaction conditions find use in the present invention. In some embodiments, methods are used to analyze the improved properties of the engineered polypeptides to carry out the isomerization reaction. In some embodiments, the reaction conditions are modified with regard to concentrations or amounts of engineered PanK, substrate(s), buffer(s), solvent(s), co-factors, pH, conditions including temperature and reaction time, and/or conditions with the engineered PanK polypeptide immobilized on a solid support, as further described below and in the Examples.

[0135] In some embodiments, additional reaction components or additional techniques are utilized to supplement the reaction conditions. In some embodiments, these include taking measures to stabilize or prevent inactivation of the enzyme, reduce product inhibition, shift reaction equilibrium to desired product formation.

[0136] In some further embodiments, any of the above described process for the conversion of substrate compound to product compound can further comprise one or more steps selected from: extraction, isolation, purification, crystallization, filtration, and/or lyophilization of product compound(s). Methods, techniques, and protocols for extracting, isolating, purifying, and/or crystallizing the product(s) from biocatalytic reaction mixtures produced by the processes provided herein are known to the ordinary artisan and/or accessed through routine experimentation. Additionally, illustrative methods are provided in the Examples below.

### Methods of Using the Engineered Pantothenate Kinase Enzymes

[0137] In some embodiments, the PanK enzymes described herein find use in processes for converting compound (7) to compound (8). Generally, the process for performing the phosphorylation reaction comprises contacting or incubating the substrate compound in presence of a co-substrate, such as adenylate triphosphate (ATP), with an acetate kinase enzyme and acetyl phosphate used to recycle the resulting adenylate triphosphate (ADP) back to ATP.

[0138] In the embodiments provided herein and illustrated in the Examples, various ranges of suitable reaction conditions that can be used in the processes, include but are not limited to, substrate loading, co-substrate loading, reductant, divalent transition metal, pH, temperature, buffer, solvent system, polypeptide loading, and reaction time. Further suitable reaction conditions for carrying out the process for biocatalytic conversion of substrate compounds to product compounds using an engineered PanK polypeptide described herein can be readily optimized in view of the guidance provided herein by routine experimentation that includes, but is not limited to, contacting the engineered PanK polypeptide and substrate compound under experimental reaction conditions of concentration, pH, temperature, and solvent conditions, and detecting the product compound.

[0139] Suitable reaction conditions using the engineered PanK polypeptides typically comprise a co-substrate, which is used stoichiometrically in the phosphorylation reaction. Generally, the co-substrate for PanK enzymes is ATP. Other phosphoryl group donors that are capable of serving as co-substrates for PanK enzymes can be used. Because the co-substrate is used stoichiometrically, the co-substrate is present at an equimolar or higher amount than that of the substrate compound (i.e., the molar concentration of co-substrate is equivalent to or higher than the molar concentration of substrate compound). In some embodiments, the suitable reaction conditions can comprise a co-substrate molar concentration of at least 1 fold, 1.5 fold, 2 fold, 3 fold 4 fold or 5 fold or more than the molar concentration of the substrate compound. In some embodiments, the suitable reaction conditions can comprise a co-substrate concentration, particularly ATP, of about 0.0005 M to about 2 M, 0.01 M to about 2 M, 0.1 M to about 2 M, 0.2 M to about 2 M, about 0.5 M to about 2 M, or about 1 M to about 2 M. In some embodiments, the reaction conditions comprise a co-substrate concentration of about 0.0001 M, 0.001 M, 0.01 M, 0.1 M, 0.2 M, 0.3 M, 0.4 M, 0.5 M, 0.6 M, 0.7 M, 0.8 M, 1 M, 1.5 M, or 2 M. In some embodiments, additional co-substrate can be added during the reaction. In some additional embodiments, the co-substrate is present in lower concentrations due to the presence of a recycling system, such as acetate kinase and acetyl phosphate, that recycles ADP to ATP.

[0140] Substrate compound in the reaction mixtures can be varied, taking into consideration, for example, the desired amount of product compound, the effect of substrate concentration on enzyme activity, stability of enzyme under reaction conditions, and the percent conversion of substrate to product. In some embodiments, the suitable reaction conditions comprise a substrate compound loading of at least about 0.5 to about 200 g/L, 1 to about 200 g/L, 5 to about 150 g/L, about 10 to about 100 g/L, 20 to about 100 g/L or about 50 to about 100 g/L. In some embodiments, the suitable reaction conditions comprise a substrate compound loading of at least about 0.5 g/L, at least about 1 g/L, at least about 5 g/L, at least about 10 g/L, at least about 15 g/L, at least about 20 g/L, at least about 30 g/L, at least about 50 g/L, at least about 75 g/L, at least about 100 g/L, at least about 150 g/L or at least about 200 g/L, or even greater. The values for substrate loadings provided herein are based on the molecular weight of 2-ethynylglycerol; however, it also contemplated that the equivalent molar amounts of various alcohol or aldehyde analogues also can be used in the process.

[0141] In carrying out the PanK mediated processes described herein, the engineered polypeptide may be added to the reaction mixture in the form of a purified enzyme, partially purified enzyme, whole cells transformed with gene(s) encoding the enzyme, as cell extracts and/or lysates of such cells, and/or as an enzyme immobilized on a solid support. Whole cells transformed with gene(s) encoding the engineered PanK enzyme or cell extracts, lysates thereof, and isolated enzymes may be employed in a variety of different forms, including solid (e.g., lyophilized, spray-dried, and the like) or semisolid (e.g., a crude paste). The cell extracts or cell lysates may be partially purified by precipitation (ammonium sulfate, polyethyleneimine, heat treatment or the like, followed by a desalting procedure prior to lyophilization (e.g., ultrafiltration, dialysis, etc.). Any of the enzyme preparations (including whole cell preparations) may be stabilized by crosslinking using known crosslinking agents, such as, for example, glutaraldehyde or immobilization to a solid phase (e.g., Eupergit C, and the like).

[0142] The gene(s) encoding the engineered PanK polypeptides can be transformed into host cells separately or together into the same host cell. For example, in some embodiments one set of host cells can be transformed with gene(s) encoding one engineered PanK polypeptide and another set can be transformed with gene(s) encoding another engineered PanK polypeptide. Both sets of transformed cells can be utilized together in the reaction mixture in the form of whole cells, or in the form of lysates or extracts derived therefrom. In other embodiments, a host cell can be transformed with gene(s) encoding multiple engineered PanK polypeptides. In some embodiments the engineered polypeptides can be expressed in the form of secreted polypeptides, and the culture medium containing the secreted polypeptides can be used for the PanK reaction.

[0143] In some embodiments, the improved activity and/or selectivity of the engineered PanK polypeptides disclosed herein provides for processes wherein higher percentage conversion can be achieved with lower concentrations of the engineered polypeptide. In some embodiments of the process, the suitable reaction conditions comprise an engineered polypeptide amount of about 0.03% (w/w), 0.05% (w/w), 0.1% (w/w), 0.15% (w/w), 0.2% (w/w), 0.3% (w/w), 0.4% (w/w), 0.5% (w/w), 1% (w/w), 2% (w/w), 5% (w/w), 10% (w/w), 20% (w/w) or more of substrate compound loading.

[0144] In some embodiments, the engineered polypeptide is present at about 0.01 g/L to about 15 g/L; about 0.05 g/L to about 15 g/L; about 0.1 g/L to about 10 g/L; about 1 g/L to about 8 g/L; about 0.5 g/L to about 10 g/L; about 1 g/L to about 10 g/L; about 0.1 g/L to about 5 g/L; about 0.5 g/L to about 5 g/L; or about 0.1 g/L to about 2 g/L. In some embodiments, the PanK polypeptide is present at about 0.01 g/L, 0.05 g/L, 0.1 g/L, 0.2 g/L, 0.5 g/L, 1 g/L, 2 g/L, 5 g/L, 10 g/L, or 15 g/L.

[0145] In some embodiments, the reaction conditions also comprise a divalent metal capable of serving as a cofactor in the reaction. Generally, the divalent metal co-factor is magnesium (i.e., Mg⁺²). The magnesium ion may be provided in various forms, such as magnesium chloride (MgCl₂). While magnesium ion is the metal co-factor found in the naturally occurring PanK enzyme and functions efficiently in the engineered enzymes, it is to be understood that other divalent metals capable of acting as a co-factor can be used in the processes. In some embodiments, the reaction conditions can comprises a divalent metal cofactor, particularly Mg′, at a concentration of about 1 mM to 1 M, 1 mM to 100 mM, 1 mM to about 50 mM, 25 mM to about 35 mM, about 30 mM to about 60 mM or about 55 mM to about 65 mM. In some embodiments, the reaction conditions comprise a divalent metal co-factor concentration of about 1 mM, 10 mM, 20 mM, 30 mM, 40 mM, 50 mM, 60 mM, 70 mM, 80 mM, 90 mM, or 100 mM.

[0146] During the course of the reaction, the pH of the reaction mixture may change. The pH of the reaction mixture may be maintained at a desired pH or within a desired pH range. This may be done by the addition of an acid or a base, before and/or during the course of the reaction. Alternatively, the pH may be controlled by using a buffer. Accordingly, in some embodiments, the reaction condition comprises a buffer. Suitable buffers to maintain desired pH ranges are known in the art and include, by way of example and not limitation, borate, phosphate, 2-(N-morpholino)ethanesulfonic acid (MES), 3-(N-morpholino)propanesulfonic acid (MOPS), acetate, triethanolamine, and 2-amino-2-hydroxymethyl-propane-1,3-diol (Tris), and the like. In some embodiments, the buffer is tris. In some embodiments of the process, the suitable reaction conditions comprise a buffer (e.g., tris) concentration of from about 0.01 to about 0.4 M, 0.05 to about 0.4 M, 0.1 to about 0.3 M, or about 0.1 to about 0.2 M. In some embodiments, the reaction condition comprises a buffer (e.g., tris) concentration of about 0.01, 0.02, 0.03, 0.04, 0.05, 0.07, 0.1, 0.12, 0.14, 0.16, 0.18, 0.2, 0.3, or 0.4 M.

[0147] In some embodiments, the reaction condition comprises a wet organic solvent. Suitable wet organic solvents are known in the art and include, by way of example and not limitation, wet isopropyl alcohol, wet toluene, and wet methyl tertiary butyl ether.

[0148] In the embodiments of the process, the reaction conditions can comprise a suitable pH. The desired pH or desired pH range can be maintained by use of an acid or base, an appropriate buffer, or a combination of buffering and acid or base addition. The pH of the reaction mixture can be controlled before and/or during the course of the reaction. In some embodiments, the suitable reaction conditions comprise a solution pH from about 4 to about 10, pH from about 5 to about 10, pH from about 5 to about 9, pH from about 6 to about 9, pH from about 6 to about 8. In some embodiments, the reaction conditions comprise a solution pH of about 4, 4.5, 5, 5.5, 6, 6.5, 7, 7.5, 8, 8.5, 9, 9.5, or

[0149] In the embodiments of the processes herein, a suitable temperature can be used for the reaction conditions, for example, taking into consideration the increase in reaction rate at higher temperatures, and the activity of the enzyme during the reaction time period. Accordingly, in some embodiments, the suitable reaction conditions comprise a temperature of about 10° C. to about 60° C., about 10° C. to about 55° C., about 15° C. to about 60° C., about 20° C. to about 60° C., about 20° C. to about 55° C., about 25° C. to about 55° C., or about 30° C. to about 50° C. In some embodiments, the suitable reaction conditions comprise a temperature of about 10° C., 15° C., 20° C., 25° C., 30° C., 35° C., 40° C., 45° C., 50° C., 55° C., or 60° C. In some embodiments, the temperature during the enzymatic reaction can be maintained at a specific temperature throughout the course of the reaction. In some embodiments, the temperature during the enzymatic reaction can be adjusted over a temperature profile during the course of the reaction.

[0150] In some embodiments, the reaction conditions can comprise a surfactant for stabilizing or enhancing the reaction. Surfactants can comprise non-ionic, cationic, anionic and/or amphiphilic surfactants. Exemplary surfactants, include by way of example and not limitation, nonyl phenoxypolyethoxylethanol (NP40), Triton X-100, polyoxyethylene-stearylamine, cetyltrimethylammonium bromide, sodium oleylamidosulfate, polyoxyethylene-sorbitanmonostearate, hexadecyldimethylamine, etc. Any surfactant that may stabilize or enhance the reaction may be employed. The concentration of the surfactant to be employed in the reaction may be generally from 0.1 to 50 mg/ml, particularly from 1 to 20 mg/ml.

[0151] In some embodiments, the reaction conditions can include an antifoam agent, which aids in reducing or preventing formation of foam in the reaction solution, such as when the reaction solutions are mixed or sparged. Anti-foam agents include non-polar oils (e.g., minerals, silicones, etc.), polar oils (e.g., fatty acids, alkyl amines, alkyl amides, alkyl sulfates, etc.), and hydrophobic (e.g., treated silica, polypropylene, etc.), some of which also function as surfactants. Exemplary anti-foam agents include, Y-30® (Dow Corning), poly-glycol copolymers, oxy/ethoxylated alcohols, and polydimethylsiloxanes. In some embodiments, the anti-foam can be present at about 0.001% (v/v) to about 5% (v/v), about 0.01% (v/v) to about 5% (v/v), about 0.1% (v/v) to about 5% (v/v), or about 0.1% (v/v) to about 2% (v/v). In some embodiments, the anti-foam agent can be present at about (v/v), about 0.01% (v/v), about 0.1% (v/v), about 0.5% (v/v), about 1% (v/v), about 2% (v/v), about 3% (v/v), about 4% (v/v), or about 5% (v/v) or more as desirable to promote the reaction.

[0152] The quantities of reactants used in the kinase reaction will generally vary depending on the quantities of product desired, and concomitantly the amount of PanK substrate employed. Those having ordinary skill in the art will readily understand how to vary these quantities to tailor them to the desired level of productivity and scale of production.

[0153] In some embodiments, the order of addition of reactants is not critical. The reactants may be added together at the same time to a solvent (e.g., monophasic solvent, biphasic aqueous co-solvent system, and the like), or alternatively, some of the reactants may be added separately, and some together at different time points. For example, the cofactor, co-substrate, PanK enzyme, and substrate may be added first to the solvent.

[0154] The solid reactants (e.g., enzyme, salts, etc.) may be provided to the reaction in a variety of different forms, including powder (e.g., lyophilized, spray dried, and the like), solution, emulsion, suspension, and the like. The reactants can be readily lyophilized or spray dried using methods and equipment that are known to those having ordinary skill in the art. For example, the protein solution can be frozen at −80° C. in small aliquots, then added to a pre-chilled lyophilization chamber, followed by the application of a vacuum.

[0155] For improved mixing efficiency when an aqueous co-solvent system is used, the PanK enzyme, and cofactor may be added and mixed into the aqueous phase first. The organic phase may then be added and mixed in, followed by addition of the PanK enzyme substrate and co-substrate. Alternatively, the PanK enzyme substrate may be premixed in the organic phase, prior to addition to the aqueous phase.

[0156] The phosphorylation process is generally allowed to proceed until further conversion of substrate to phosphorylated product does not change significantly with reaction time (e.g., less than 10% of substrate being converted, or less than 5% of substrate being converted). In some embodiments, the reaction is allowed to proceed until there is complete or near complete conversion of substrate to product. Transformation of substrate to product can be monitored using known methods by detecting substrate and/or product, with or without derivatization. Suitable analytical methods include gas chromatography, HPLC, MS, and the like.

[0157] In some embodiments of the process, the suitable reaction conditions comprise a substrate loading of at least about 5 g/L, 10 g/L, 20 g/L, 30 g/L, 40 g/L, 50 g/L, 60 g/L, 70 g/L, 100 g/L, or more, and wherein the method results in at least about 50%, 60%, 70%, 80%, 90%, 95% or greater conversion of substrate compound to product compound in about 48 h or less, in about 36 h or less, in about 24 h or less, or in about 3 h or less.

[0158] In further embodiments of the processes for converting substrate compound to product compound using the engineered PanK polypeptides, the suitable reaction conditions can comprise an initial substrate loading to the reaction solution which is then contacted by the polypeptide. This reaction solution is then further supplemented with additional substrate compound as a continuous or batchwise addition over time at a rate of at least about 1 g/L/h, at least about 2 g/L/h, at least about 4 g/L/h, at least about 6 g/L/h, or higher. Thus, according to these suitable reaction conditions, polypeptide is added to a solution having an initial substrate loading of at least about 20 g/L, 30 g/L, or 40 g/L. This addition of polypeptide is then followed by continuous addition of further substrate to the solution at a rate of about 2 g/L/h, 4 g/L/h, or 6 g/L/h until a much higher final substrate loading of at least about 30 g/L, 40 g/L, 50 g/L, 60 g/L, 70 g/L, 100 g/L, 150 g/L, 200 g/L or more, is reached. Accordingly, in some embodiments of the process, the suitable reaction conditions comprise addition of the polypeptide to a solution having an initial substrate loading of at least about 20 g/L, 30 g/L, or 40 g/L followed by addition of further substrate to the solution at a rate of about 2 g/L/h, 4 g/L/h, or 6 g/L/h until a final substrate loading of at least about 30 g/L, 40 g/L, 50 g/L, 60 g/L, 70 g/L, 100 g/L or more, is reached. This substrate supplementation reaction condition allows for higher substrate loadings to be achieved while maintaining high rates of conversion of substrate to phosphorylated product of at least about 50%, 60%, 70%, 80%, 90% or greater conversion of substrate.

[0159] In some embodiments, acetate kinase and acetyl phosphate recycle ADP to ATP. In some embodiments, acetate kinase and acetyl phosphate recycle an ADP analogue to an ATP analogue.

[0160] In some embodiments of the processes, the reaction using an engineered PanK polypeptide can comprise the following suitable reaction conditions: (a) substrate loading at about 50 g/L; (b) about 0.5 g/L of the engineered polypeptide; (c) 1.25 eq acetyl phosphate; (d) about 0.1 mol % ATP; (e) about 10 mM MgCl₂; (f) about 0.125 mg/mL acetate kinase; (g) a pH of about 8.0; (h) temperature of about 25° C.; and (i) reaction time of about 18 hrs.

[0161] In some embodiments, additional reaction components or additional techniques are carried out to supplement the reaction conditions. These can include taking measures to stabilize or prevent inactivation of the enzyme, reduce product inhibition, shift reaction equilibrium to product formation.

[0162] In further embodiments, any of the above described process for the conversion of substrate compound to product compound can further comprise one or more steps selected from: extraction; isolation; purification; and crystallization of product compound. Methods, techniques, and protocols for extracting, isolating, purifying, and/or crystallizing the product from biocatalytic reaction mixtures produced by the above disclosed processes are known to the ordinary artisan and/or accessed through routine experimentation. Additionally, illustrative methods are provided in the Examples below.

[0163] Various features and embodiments of the invention are illustrated in the following representative examples, which are intended to be illustrative, and not limiting.

### Engineered PanK Polynucleotides Encoding Engineered Polypeptides, Expression Vectors and Host Cells

[0164] The present invention provides polynucleotides encoding the engineered enzyme polypeptides described herein. In some embodiments, the polynucleotides are operatively linked to one or more heterologous regulatory sequences that control gene expression to create a recombinant polynucleotide capable of expressing the polypeptide. In some embodiments, expression constructs containing at least one heterologous polynucleotide encoding the engineered enzyme polypeptide(s) are introduced into appropriate host cells to express the corresponding enzyme polypeptide(s).

[0165] As will be apparent to the skilled artisan, availability of a protein sequence and the knowledge of the codons corresponding to the various amino acids provide a description of all the polynucleotides capable of encoding the subject polypeptides. The degeneracy of the genetic code, where the same amino acids are encoded by alternative or synonymous codons, allows an extremely large number of nucleic acids to be made, all of which encode an engineered enzyme (e.g., PanK) polypeptide. Thus, the present invention provides methods and compositions for the production of each and every possible variation of enzyme polynucleotides that could be made that encode the enzyme polypeptides described herein by selecting combinations based on the possible codon choices, and all such variations are to be considered specifically disclosed for any polypeptide described herein, including the amino acid sequences presented in the Examples (e.g., in the various Tables).

[0166] In some embodiments, the codons are preferably optimized for utilization by the chosen host cell for protein production. For example, preferred codons used in bacteria are typically used for expression in bacteria. Consequently, codon optimized polynucleotides encoding the engineered enzyme polypeptides contain preferred codons at about 40%, 50%, 60%, 70%, 80%, 90%, or greater than 90% of the codon positions in the full length coding region.

[0167] In some embodiments, the enzyme polynucleotide encodes an engineered polypeptide having enzyme activity with the properties disclosed herein, wherein the polypeptide comprises an amino acid sequence having at least 60%, 65%, 70%, 75%, 80%, 85%, 86%, 87%, 88%, 89%, 90%, 91%, 92%, 93%, 94%, 95%, 96%, 97%, 98%, 99% or more identity to a reference sequence selected from the SEQ ID NOS provided herein, or the amino acid sequence of any variant (e.g., those provided in the Examples), and one or more residue differences as compared to the reference polynucleotide(s), or the amino acid sequence of any variant as disclosed in the Examples (for example 1, 2, 3, 4, 5, 6, 7, 8, 9, 10 or more amino acid residue positions). In some embodiments, the reference polypeptide sequence comprises SEQ ID NO: 4, while in some other embodiments, the reference polypeptide sequence comprises SEQ ID NO: 44, SEQ ID NO: 320, and/or SEQ ID NO: 526.

[0168] In some embodiments, the polynucleotides are capable of hybridizing under highly stringent conditions to a reference polynucleotide sequence selected from any polynucleotide sequence provided herein, or a complement thereof, or a polynucleotide sequence encoding any of the variant enzyme polypeptides provided herein. In some embodiments, the polynucleotide capable of hybridizing under highly stringent conditions encodes an enzyme polypeptide comprising an amino acid sequence that has one or more residue differences as compared to a reference sequence.

[0169] In some embodiments, an isolated polynucleotide encoding any of the engineered enzyme polypeptides herein is manipulated in a variety of ways to facilitate expression of the enzyme polypeptide. In some embodiments, the polynucleotides encoding the enzyme polypeptides comprise expression vectors where one or more control sequences is present to regulate the expression of the enzyme polynucleotides and/or polypeptides. Manipulation of the isolated polynucleotide prior to its insertion into a vector may be desirable or necessary depending on the expression vector utilized. Techniques for modifying polynucleotides and nucleic acid sequences utilizing recombinant DNA methods are well known in the art. In some embodiments, the control sequences include among others, promoters, leader sequences, polyadenylation sequences, propeptide sequences, signal peptide sequences, and transcription terminators. In some embodiments, suitable promoters are selected based on the host cells selection. For bacterial host cells, suitable promoters for directing transcription of the nucleic acid constructs of the present disclosure, include, but are not limited to promoters obtained from the E. coli lac operon, Streptomyces coelicolor agarase gene (dagA), Bacillus subtilis levansucrase gene (sacB), Bacillus licheniformis alpha-amylase gene (amyL), Bacillus stearothermophilus maltogenic amylase gene (amyM), Bacillus amyloliquefaciens alpha-amylase gene (amyQ), Bacillus licheniformis penicillinase gene (penP), Bacillus subtilis xylA and xylB genes, and prokaryotic beta-lactamase gene (See e.g., Villa-Kamaroff et al., Proc. Natl Acad. Sci. USA 75: 3727-3731 [1978]), as well as the tac promoter (See e.g., DeBoer et al., Proc. Natl Acad. Sci. USA 80: 21-25 [1983]). Exemplary promoters for filamentous fungal host cells, include, but are not limited to promoters obtained from the genes for Aspergillus oryzae TAKA amylase, Rhizomucor miehei aspartic proteinase, Aspergillus niger neutral alpha-amylase, Aspergillus niger acid stable alpha-amylase, Aspergillus niger or Aspergillus awamori glucoamylase (glaA), Rhizomucor miehei lipase, Aspergillus oryzae alkaline protease, Aspergillus oryzae triose phosphate isomerase, Aspergillus nidulans acetamidase, and Fusarium oxysporum trypsin-like protease (See e.g., WO 96/00787), as well as the NA2-tpi promoter (a hybrid of the promoters from the genes for Aspergillus niger neutral alpha-amylase and Aspergillus oryzae triose phosphate isomerase), and mutant, truncated, and hybrid promoters thereof. Exemplary yeast cell promoters can be from the genes can be from the genes for Saccharomyces cerevisiae enolase (ENO-1), Saccharomyces cerevisiae galactokinase (GAL1), Saccharomyces cerevisiae alcohol dehydrogenase/glyceraldehyde-3-phosphate dehydrogenase (ADH2/GAP), and Saccharomyces cerevisiae 3-phosphoglycerate kinase. Other useful promoters for yeast host cells are known in the art (See e.g., Romanos et al., Yeast 8:423-488 [1992]).

[0170] In some embodiments, the control sequence is also a suitable transcription terminator sequence (i.e., a sequence recognized by a host cell to terminate transcription). In some embodiments, the terminator sequence is operably linked to the 3′ terminus of the nucleic acid sequence encoding the enzyme polypeptide. Any suitable terminator which is functional in the host cell of choice finds use in the present invention. Exemplary transcription terminators for filamentous fungal host cells can be obtained from the genes for Aspergillus oryzae TAKA amylase, Aspergillus niger glucoamylase, Aspergillus nidulans anthranilate synthase, Aspergillus niger alpha-glucosidase, and Fusarium oxysporum trypsin-like protease. Exemplary terminators for yeast host cells can be obtained from the genes for Saccharomyces cerevisiae enolase, Saccharomyces cerevisiae cytochrome C (CYC1), and Saccharomyces cerevisiae glyceraldehyde-3-phosphate dehydrogenase. Other useful terminators for yeast host cells are known in the art (See e.g., Romanos et al., supra).

[0171] In some embodiments, the control sequence is also a suitable leader sequence (i.e., a non-translated region of an mRNA that is important for translation by the host cell). In some embodiments, the leader sequence is operably linked to the 5′ terminus of the nucleic acid sequence encoding the enzyme polypeptide. Any suitable leader sequence that is functional in the host cell of choice find use in the present invention. Exemplary leaders for filamentous fungal host cells are obtained from the genes for Aspergillus oryzae TAKA amylase, and Aspergillus nidulans triose phosphate isomerase. Suitable leaders for yeast host cells are obtained from the genes for Saccharomyces cerevisiae enolase (ENO-1), Saccharomyces cerevisiae 3-phosphoglycerate kinase, Saccharomyces cerevisiae alpha-factor, and Saccharomyces cerevisiae alcohol dehydrogenase/glyceraldehyde-3-phosphate dehydrogenase (ADH2/GAP).

[0172] In some embodiments, the control sequence is also a polyadenylation sequence (i.e., a sequence operably linked to the 3′ terminus of the nucleic acid sequence and which, when transcribed, is recognized by the host cell as a signal to add polyadenosine residues to transcribed mRNA). Any suitable polyadenylation sequence which is functional in the host cell of choice finds use in the present invention. Exemplary polyadenylation sequences for filamentous fungal host cells include, but are not limited to the genes for Aspergillus oryzae TAKA amylase, Aspergillus niger glucoamylase, Aspergillus nidulans anthranilate synthase, Fusarium oxysporum trypsin-like protease, and Aspergillus niger alpha-glucosidase. Useful polyadenylation sequences for yeast host cells are known (See e.g., Guo and Sherman, Mol. Cell. Biol., 15:5983-5990 [1995]).

[0173] In some embodiments, the control sequence is also a signal peptide (i.e., a coding region that codes for an amino acid sequence linked to the amino terminus of a polypeptide and directs the encoded polypeptide into the cell's secretory pathway). In some embodiments, the 5′ end of the coding sequence of the nucleic acid sequence inherently contains a signal peptide coding region naturally linked in translation reading frame with the segment of the coding region that encodes the secreted polypeptide. Alternatively, in some embodiments, the 5′ end of the coding sequence contains a signal peptide coding region that is foreign to the coding sequence. Any suitable signal peptide coding region which directs the expressed polypeptide into the secretory pathway of a host cell of choice finds use for expression of the engineered polypeptide(s). Effective signal peptide coding regions for bacterial host cells are the signal peptide coding regions include, but are not limited to those obtained from the genes for Bacillus NC1B 11837 maltogenic amylase, Bacillus stearothermophilus alpha-amylase, Bacillus licheniformis subtilisin, Bacillus licheniformis beta-lactamase, Bacillus stearothermophilus neutral proteases (nprT, nprS, nprM), and Bacillus subtilis prsA. Further signal peptides are known in the art (See e.g., Simonen and Palva, Microbiol. Rev., 57:109-137 [1993]). In some embodiments, effective signal peptide coding regions for filamentous fungal host cells include, but are not limited to the signal peptide coding regions obtained from the genes for Aspergillus oryzae TAKA amylase, Aspergillus niger neutral amylase, Aspergillus niger glucoamylase, Rhizomucor miehei aspartic proteinase, Humicola insolens cellulase, and Humicola lanuginosa lipase. Useful signal peptides for yeast host cells include, but are not limited to those from the genes for Saccharomyces cerevisiae alpha-factor and Saccharomyces cerevisiae invertase.

[0174] In some embodiments, the control sequence is also a propeptide coding region that codes for an amino acid sequence positioned at the amino terminus of a polypeptide. The resultant polypeptide is referred to as a “proenzyme,” “propolypeptide,” or “zymogen.” A propolypeptide can be converted to a mature active polypeptide by catalytic or autocatalytic cleavage of the propeptide from the propolypeptide. The propeptide coding region may be obtained from any suitable source, including, but not limited to the genes for Bacillus subtilis alkaline protease (aprE), Bacillus subtilis neutral protease (nprT), Saccharomyces cerevisiae alpha-factor, Rhizomucor miehei aspartic proteinase, and Myceliophthora thermophila lactase (See e.g., WO 95/33836). Where both signal peptide and propeptide regions are present at the amino terminus of a polypeptide, the propeptide region is positioned next to the amino terminus of a polypeptide and the signal peptide region is positioned next to the amino terminus of the propeptide region.

[0175] In some embodiments, regulatory sequences are also utilized. These sequences facilitate the regulation of the expression of the polypeptide relative to the growth of the host cell. Examples of regulatory systems are those that cause the expression of the gene to be turned on or off in response to a chemical or physical stimulus, including the presence of a regulatory compound. In prokaryotic host cells, suitable regulatory sequences include, but are not limited to the lac, tac, and trp operator systems. In yeast host cells, suitable regulatory systems include, but are not limited to the ADH2 system or GALL system. In filamentous fungi, suitable regulatory sequences include, but are not limited to the TAKA alpha-amylase promoter, Aspergillus niger glucoamylase promoter, and Aspergillus oryzae glucoamylase promoter.

[0176] In another aspect, the present invention is directed to a recombinant expression vector comprising a polynucleotide encoding an engineered enzyme polypeptide, and one or more expression regulating regions such as a promoter and a terminator, a replication origin, etc., depending on the type of hosts into which they are to be introduced. In some embodiments, the various nucleic acid and control sequences described herein are joined together to produce recombinant expression vectors which include one or more convenient restriction sites to allow for insertion or substitution of the nucleic acid sequence encoding the enzyme polypeptide at such sites. Alternatively, in some embodiments, the nucleic acid sequence of the present invention is expressed by inserting the nucleic acid sequence or a nucleic acid construct comprising the sequence into an appropriate vector for expression. In some embodiments involving the creation of the expression vector, the coding sequence is located in the vector so that the coding sequence is operably linked with the appropriate control sequences for expression.

[0177] The recombinant expression vector may be any suitable vector (e.g., a plasmid or virus), that can be conveniently subjected to recombinant DNA procedures and bring about the expression of the enzyme polynucleotide sequence. The choice of the vector typically depends on the compatibility of the vector with the host cell into which the vector is to be introduced. The vectors may be linear or closed circular plasmids.

[0178] In some embodiments, the expression vector is an autonomously replicating vector (i.e., a vector that exists as an extra-chromosomal entity, the replication of which is independent of chromosomal replication, such as a plasmid, an extra-chromosomal element, a minichromosome, or an artificial chromosome). The vector may contain any means for assuring self-replication. In some alternative embodiments, the vector is one in which, when introduced into the host cell, it is integrated into the genome and replicated together with the chromosome(s) into which it has been integrated. Furthermore, in some embodiments, a single vector or plasmid, or two or more vectors or plasmids which together contain the total DNA to be introduced into the genome of the host cell, and/or a transposon is utilized.

[0179] In some embodiments, the expression vector contains one or more selectable markers, which permit easy selection of transformed cells. A “selectable marker” is a gene, the product of which provides for biocide or viral resistance, resistance to heavy metals, prototrophy to auxotrophs, and the like. Examples of bacterial selectable markers include, but are not limited to the dal genes from Bacillus subtilis or Bacillus licheniformis, or markers, which confer antibiotic resistance such as ampicillin, kanamycin, chloramphenicol or tetracycline resistance. Suitable markers for yeast host cells include, but are not limited to ADE2, HIS3, LEU2, LYS2, MET3, TRP1, and URA3. Selectable markers for use in filamentous fungal host cells include, but are not limited to, amdS (acetamidase; e.g., from A. nidulans or A. orzyae), argB (ornithine carbamoyltransferases), bar (phosphinothricin acetyltransferase; e.g., from S. hygroscopicus), hph (hygromycin phosphotransferase), niaD (nitrate reductase), pyrG (orotidine-5′-phosphate decarboxylase; e.g., from A. nidulans or A. orzyae), sC (sulfate adenyltransferase), and trpC (anthranilate synthase), as well as equivalents thereof.

[0180] In another aspect, the present invention provides a host cell comprising at least one polynucleotide encoding at least one engineered enzyme polypeptide of the present invention, the polynucleotide(s) being operatively linked to one or more control sequences for expression of the engineered enzyme enzyme(s) in the host cell. Host cells suitable for use in expressing the polypeptides encoded by the expression vectors of the present invention are well known in the art and include but are not limited to, bacterial cells, such as E. coli, Vibrio fluvialis, Streptomyces and Salmonella typhimurium cells; fungal cells, such as yeast cells (e.g., Saccharomyces cerevisiae or Pichia pastoris (ATCC Accession No. 201178)); insect cells such as Drosophila S2 and Spodoptera Sf9 cells; animal cells such as CHO, COS, BHK, 293, and Bowes melanoma cells; and plant cells. Exemplary host cells also include various Escherichia coli strains (e.g., W3110 (AfhuA) and BL21). Examples of bacterial selectable markers include, but are not limited to the dal genes from Bacillus subtilis or Bacillus licheniformis, or markers, which confer antibiotic resistance such as ampicillin, kanamycin, chloramphenicol, and or tetracycline resistance.

[0181] In some embodiments, the expression vectors of the present invention contain an element(s) that permits integration of the vector into the host cell's genome or autonomous replication of the vector in the cell independent of the genome. In some embodiments involving integration into the host cell genome, the vectors rely on the nucleic acid sequence encoding the polypeptide or any other element of the vector for integration of the vector into the genome by homologous or nonhomologous recombination.

[0182] In some alternative embodiments, the expression vectors contain additional nucleic acid sequences for directing integration by homologous recombination into the genome of the host cell. The additional nucleic acid sequences enable the vector to be integrated into the host cell genome at a precise location(s) in the chromosome(s). To increase the likelihood of integration at a precise location, the integrational elements preferably contain a sufficient number of nucleotides, such as 100 to 10,000 base pairs, preferably 400 to 10,000 base pairs, and most preferably 800 to 10,000 base pairs, which are highly homologous with the corresponding target sequence to enhance the probability of homologous recombination. The integrational elements may be any sequence that is homologous with the target sequence in the genome of the host cell. Furthermore, the integrational elements may be non-encoding or encoding nucleic acid sequences. On the other hand, the vector may be integrated into the genome of the host cell by non-homologous recombination.

[0183] For autonomous replication, the vector may further comprise an origin of replication enabling the vector to replicate autonomously in the host cell in question. Examples of bacterial origins of replication are P15A on or the origins of replication of plasmids pBR322, pUC19, pACYC177 (which plasmid has the PISA ori), or pACYC184 permitting replication in E. coli, and pUB110, pE194, or pTA1060 permitting replication in Bacillus. Examples of origins of replication for use in a yeast host cell are the 2 micron origin of replication, ARS1, ARS4, the combination of ARS1 and CEN3, and the combination of ARS4 and CEN6. The origin of replication may be one having a mutation which makes its functioning temperature-sensitive in the host cell (See e.g., Ehrlich, Proc. Natl. Acad. Sci. USA 75:1433 [1978]).

[0184] In some embodiments, more than one copy of a nucleic acid sequence of the present invention is inserted into the host cell to increase production of the gene product. An increase in the copy number of the nucleic acid sequence can be obtained by integrating at least one additional copy of the sequence into the host cell genome or by including an amplifiable selectable marker gene with the nucleic acid sequence where cells containing amplified copies of the selectable marker gene, and thereby additional copies of the nucleic acid sequence, can be selected for by cultivating the cells in the presence of the appropriate selectable agent.

[0185] Many of the expression vectors for use in the present invention are commercially available. Suitable commercial expression vectors include, but are not limited to the p3xFLAGTM™ expression vectors (Sigma-Aldrich Chemicals), which include a CMV promoter and hGH polyadenylation site for expression in mammalian host cells and a pBR322 origin of replication and ampicillin resistance markers for amplification in E. coli. Other suitable expression vectors include, but are not limited to pBluescriptll SK(-) and pBK-CMV (Stratagene), and plasmids derived from pBR322 (Gibco BRL), pUC (Gibco BRL), pREP4, pCEP4 (Invitrogen) or pPoly (See e.g., Lathe et al., Gene 57:193-201) [1987]).

[0186] Thus, in some embodiments, a vector comprising a sequence encoding at least one variant pantothenate kinase is transformed into a host cell in order to allow propagation of the vector and expression of the variant pantothenate kinase(s). In some embodiments, the variant pantothenate kinases are post-translationally modified to remove the signal peptide, and in some cases, may be cleaved after secretion. In some embodiments, the transformed host cell described above is cultured in a suitable nutrient medium under conditions permitting the expression of the variant pantothenate kinase(s). Any suitable medium useful for culturing the host cells finds use in the present invention, including, but not limited to minimal or complex media containing appropriate supplements. In some embodiments, host cells are grown in HTP media. Suitable media are available from various commercial suppliers or may be prepared according to published recipes (e.g., in catalogues of the American Type Culture Collection).

[0187] In another aspect, the present invention provides host cells comprising a polynucleotide encoding an improved pantothenate kinase polypeptide provided herein, the polynucleotide being operatively linked to one or more control sequences for expression of the pantothenate kinase enzyme in the host cell. Host cells for use in expressing the pantothenate kinase polypeptides encoded by the expression vectors of the present invention are well known in the art and include but are not limited to, bacterial cells, such as E. coli, Bacillus megaterium, Lactobacillus kefir, Streptomyces and Salmonella typhimurium cells; fungal cells, such as yeast cells (e.g., Saccharomyces cerevisiae or Pichia pastoris (ATCC Accession No. 201178)); insect cells such as Drosophila S2 and Spodoptera Sf9 cells; animal cells such as CHO, COS, BHK, 293, and Bowes melanoma cells; and plant cells. Appropriate culture media and growth conditions for the above-described host cells are well known in the art.

[0188] Polynucleotides for expression of the pantothenate kinase may be introduced into cells by various methods known in the art. Techniques include among others, electroporation, biolistic particle bombardment, liposome mediated transfection, calcium chloride transfection, and protoplast fusion. Various methods for introducing polynucleotides into cells are known to those skilled in the art.

[0189] In some embodiments, the host cell is a eukaryotic cell. Suitable eukaryotic host cells include, but are not limited to, fungal cells, algal cells, insect cells, and plant cells. Suitable fungal host cells include, but are not limited to, Ascomycota, Basidiomycota, Deuteromycota, Zygomycota, Fungi imperfecti. In some embodiments, the fungal host cells are yeast cells and filamentous fungal cells. The filamentous fungal host cells of the present invention include all filamentous forms of the subdivision Eumycotina and Oomycota. Filamentous fungi are characterized by a vegetative mycelium with a cell wall composed of chitin, cellulose and other complex polysaccharides. The filamentous fungal host cells of the present invention are morphologically distinct from yeast.

[0190] In some embodiments of the present invention, the filamentous fungal host cells are of any suitable genus and species, including, but not limited to Achlya, Acremonium, Aspergillus, Aureobasidium, Bjerkandera, Ceriporiopsis, Cephalosporium, Chrysosporium, Cochliobolus, Corynascus, Cryphonectria, Cryptococcus, Coprinus, Coriolus, Endothis, Fusarium, Gibberella, Gliocladium, Humicola, Hypocrea, Myceliophthora, Mucor, Neurospora, Penicillium, Podospora, Phlebia, Piromyces, Pyricularia, Rhizomucor, Rhizopus, Schizophyllum, Scytalidium, Sporotrichum, Talaromyces, Thermoascus, Thielavia, Trametes, Tolypocladium, Trichoderma, Verticillium, and/or Volvariella, and/or teleomorphs, or anamorphs, and synonyms, basionyms, or taxonomic equivalents thereof.

[0191] In some embodiments of the present invention, the host cell is a yeast cell, including but not limited to cells of Candida, Hansenula, Saccharomyces, Schizosaccharomyces, Pichia, Kluyveromyces, or Yarrowia species. In some embodiments of the present invention, the yeast cell is Hansenula polymorpha, Saccharomyces cerevisiae, Saccharomyces carlsbergensis, Saccharomyces diastaticus, Saccharomyces norbensis, Saccharomyces kluyveri, Schizosaccharomyces pombe, Pichia pastoris, Pichia finlandica, Pichia trehalophila, Pichia kodamae, Pichia membranaefaciens, Pichia opuntiae, Pichia thermotolerans, Pichia salictaria, Pichia quercuum, Pichia pyperi, Pichia Pichia methanolica, Pichia angusta, Kluyveromyces lactis, Candida albicans, or Yarrowia hpolytica.

[0192] In some embodiments of the invention, the host cell is an algal cell such as Chlamydomonas (e.g., C. reinhardtii) and Phormidium (P. sp. ATCC29409).

[0193] In some other embodiments, the host cell is a prokaryotic cell. Suitable prokaryotic cells include, but are not limited to Gram-positive, Gram-negative and Gram-variable bacterial cells. Any suitable bacterial organism finds use in the present invention, including but not limited to Agrobacterium, Alicyclobacillus, Anabaena, Anacystis, Acinetobacter, Acidothermus, Arthrobacter, Azobacter, Bacillus, Bifidobacterium, Brevibacterium, Butyrivibrio, Buchnera, Campestris, Camplyobacter, Clostridium, Corynebacterium, Chromatium, Coprococcus, Escherichia, Enterococcus, Enterobacter, Erwinia, Fusobacterium, Faecalibacterium, Francisella, Flavobacterium, Geobacillus, Haemophilus, Helicobacter, Klebsiella, Lactobacillus, Lactococcus, Ilyobacter, Micrococcus, Microbacterium, Mesorhizobium, Methylobacterium, Methylobacterium, Mycobacterium, Neisseria, Pantoea, Pseudomonas, Prochlorococcus, Rhodobacter, Rhodopseudomonas, Rhodopseudomonas, Roseburia, Rhodospirillum, Rhodococcus, Scenedesmus, Streptomyces, Streptococcus, Synecoccus, Saccharomonospora, Staphylococcus, Serratia, Salmonella, Shigella, Thermoanaerobacterium, Tropheryma, Tularensis, Temecula, Thermosynechococcus, Thermococcus, Ureaplasma, Xanthomonas, Xylella, Yersinia and Zymomonas. In some embodiments, the host cell is a species of Agrobacterium, Acinetobacter, Azobacter, Bacillus, Bifidobacterium, Buchnera, Geobacillus, Campylobacter, Clostridium, Corynebacterium, Escherichia, Enterococcus, Erwinia, Flavobacterium, Lactobacillus, Lactococcus, Pantoea, Pseudomonas, Staphylococcus, Salmonella, Streptococcus, Streptomyces, or Zymomonas. In some embodiments, the bacterial host strain is non-pathogenic to humans. In some embodiments the bacterial host strain is an industrial strain. Numerous bacterial industrial strains are known and suitable in the present invention. In some embodiments of the present invention, the bacterial host cell is an Agrobacterium species (e.g., A. radiobacter, A. rhizogenes, and A. rubi). In some embodiments of the present invention, the bacterial host cell is an Arthrobacter species (e.g., A. aurescens, A. citreus, A. globiformis, A. hydrocarboglutamicus, A. mysorens, A. nicotianae, A. paraffineus, A. protophonniae, A. roseoparqffinus, A. sulfureus, and A. ureafaciens). In some embodiments of the present invention, the bacterial host cell is a Bacillus species (e.g., B. thuringensis, B. anthracia, B. megaterium, B. subtilis, B. lentus, B. circulans, B. pumilus, B. lautus, B. coagulans, B. brevis, B. firmus, B. alkaophius, B. licheniformis, B. clausii, B. stearothermophilus, B. halodurans, and B. amyloliquefaciens). In some embodiments, the host cell is an industrial Bacillus strain including but not limited to B. subtilis, B. pumilus, B. licheniformis, B. megaterium, B. clausii, B. stearothermophilus, or B. amyloliquefaciens. In some embodiments, the Bacillus host cells are B. subtilis, B. licheniformis, B. megaterium, B. stearothermophilus, and/or B. amyloliquefaciens. In some embodiments, the bacterial host cell is a Clostridium species (e.g., C. acetobutylicum, C. tetani E88, C. lituseburense, C. saccharobutylicum, C. perfringens, and C. beijerinckii). In some embodiments, the bacterial host cell is a Corynebacterium species (e.g., C. glutamicum and C. acetoacidophilum). In some embodiments the bacterial host cell is an Escherichia species (e.g., E. coli). In some embodiments, the host cell is Escherichia coli W3110. In some embodiments, the bacterial host cell is an Erwinia species (e.g., E. uredovora, E. carotovora, E. ananas, E. herbi cola, E. punctata, and E. terreus). In some embodiments, the bacterial host cell is a Pantoea species (e.g., P. citrea, and P. agglomerans). In some embodiments the bacterial host cell is a Pseudomonas species (e.g., P. putida, P. aeruginosa, P. mevalonii, and P. sp. D-01 10). In some embodiments, the bacterial host cell is a Streptococcus species (e.g., S. equisimiles, S. pyogenes, and S. uberis). In some embodiments, the bacterial host cell is a Streptomyces species (e.g., S. ambofaciens, S. achromogenes, S. avermitilis, S. coelicolor, S. aureofaciens, S. aureus, S. fungicidicus, S. griseus, and S. lividans). In some embodiments, the bacterial host cell is a Zymomonas species (e.g., Z. mobilis, and Z. lipolytica).

[0194] Many prokaryotic and eukaryotic strains that find use in the present invention are readily available to the public from a number of culture collections such as American Type Culture Collection (ATCC), Deutsche Sammlung von Mikroorganismen and Zellkulturen GmbH (DSM), Centraalbureau Voor Schimmelcultures (CBS), and Agricultural Research Service Patent Culture Collection, Northern Regional Research Center (NRRL).

[0195] In some embodiments, host cells are genetically modified to have characteristics that improve protein secretion, protein stability and/or other properties desirable for expression and/or secretion of a protein. Genetic modification can be achieved by genetic engineering techniques and/or classical microbiological techniques (e.g., chemical or UV mutagenesis and subsequent selection). Indeed, in some embodiments, combinations of recombinant modification and classical selection techniques are used to produce the host cells. Using recombinant technology, nucleic acid molecules can be introduced, deleted, inhibited or modified, in a manner that results in increased yields of pantothenate kinase variant(s) within the host cell and/or in the culture medium. For example, knockout of Alp 1 function results in a cell that is protease deficient, and knockout of pyr5 function results in a cell with a pyrimidine deficient phenotype. In one genetic engineering approach, homologous recombination is used to induce targeted gene modifications by specifically targeting a gene in vivo to suppress expression of the encoded protein. In alternative approaches, siRNA, antisense and/or ribozyme technology find use in inhibiting gene expression. A variety of methods are known in the art for reducing expression of protein in cells, including, but not limited to deletion of all or part of the gene encoding the protein and site-specific mutagenesis to disrupt expression or activity of the gene product. (See e.g., Chaveroche et al., Nucl. Acids Res., 28:22 e97 [2000]; Cho et al., Molec. Plant Microbe Interact., 19:7-15 [2006]; Maruyama and Kitamoto, Biotechnol Lett., 30:1811-1817 [2008]; Takahashi et al., Mol. Gen. Genom., 272: 344-352 [2004]; and You et al., Arch. Microbiol., 191:615-622 [2009], all of which are incorporated by reference herein). Random mutagenesis, followed by screening for desired mutations also finds use (See e.g., Combier et al., FEMS Microbiol. Lett., 220:141-8 [2003]; and Firon et al., Eukary. Cell 2:247-55 [2003], both of which are incorporated by reference).

[0196] Introduction of a vector or DNA construct into a host cell can be accomplished using any suitable method known in the art, including but not limited to calcium phosphate transfection, DEAE-dextran mediated transfection, PEG-mediated transformation, electroporation, or other common techniques known in the art. In some embodiments, the Escherichia coli expression vector pCK100900i (See, U.S. Pat. No. 9,714,437, which is hereby incorporated by reference herein) finds use.

[0197] In some embodiments, the engineered host cells (i.e., “recombinant host cells”) of the present invention are cultured in conventional nutrient media modified as appropriate for activating promoters, selecting transformants, or amplifying the pantothenate kinase polynucleotide. Culture conditions, such as temperature, pH and the like, are those previously used with the host cell selected for expression, and are well-known to those skilled in the art. As noted, many standard references and texts are available for the culture and production of many cells, including cells of bacterial, plant, animal (especially mammalian) and archebacterial origin.

[0198] In some embodiments, cells expressing the variant pantothenate kinase polypeptides of the invention are grown under batch or continuous fermentations conditions. Classical “batch fermentation” is a closed system, wherein the compositions of the medium are set at the beginning of the fermentation and is not subject to artificial alternations during the fermentation. A variation of the batch system is a “fed-batch fermentation” which also finds use in the present invention. In this variation, the substrate is added in increments as the fermentation progresses. Fed-batch systems are useful when catabolite repression is likely to inhibit the metabolism of the cells and where it is desirable to have limited amounts of substrate in the medium. Batch and fed-batch fermentations are common and well known in the art. “Continuous fermentation” is an open system where a defined fermentation medium is added continuously to a bioreactor and an equal amount of conditioned medium is removed simultaneously for processing. Continuous fermentation generally maintains the cultures at a constant high density where cells are primarily in log phase growth. Continuous fermentation systems strive to maintain steady state growth conditions. Methods for modulating nutrients and growth factors for continuous fermentation processes as well as techniques for maximizing the rate of product formation are well known in the art of industrial microbiology.

[0199] In some embodiments of the present invention, cell-free transcription/translation systems find use in producing variant pantothenate kinase(s). Several systems are commercially available and the methods are well-known to those skilled in the art.

[0200] The present invention provides methods of making variant pantothenate kinase polypeptides or biologically active fragments thereof. In some embodiments, the method comprises: providing a host cell transformed with a polynucleotide encoding an amino acid sequence that comprises at least about 70% (or at least about 75%, at least about 80%, at least about 85%, at least about 90%, at least about 95%, at least about 96%, at least about 97%, at least about 98%, or at least about 99%) sequence identity to SEQ ID NO: 4, SEQ ID NO: 44, SEQ ID NO: 320, and/or SEQ ID NO: 526, and comprising at least one mutation as provided herein; culturing the transformed host cell in a culture medium under conditions in which the host cell expresses the encoded variant pantothenate kinase polypeptide; and optionally recovering or isolating the expressed variant pantothenate kinase polypeptide, and/or recovering or isolating the culture medium containing the expressed variant pantothenate kinase polypeptide. In some embodiments, the methods further provide optionally lysing the transformed host cells after expressing the encoded pantothenate kinase polypeptide and optionally recovering and/or isolating the expressed variant pantothenate kinase polypeptide from the cell lysate. The present invention further provides methods of making a variant pantothenate kinase polypeptide comprising cultivating a host cell transformed with a variant pantothenate kinase polypeptide under conditions suitable for the production of the variant pantothenate kinase polypeptide and recovering the variant pantothenate kinase polypeptide. Typically, recovery or isolation of the pantothenate kinase polypeptide is from the host cell culture medium, the host cell or both, using protein recovery techniques that are well known in the art, including those described herein. In some embodiments, host cells are harvested by centrifugation, disrupted by physical or chemical means, and the resulting crude extract retained for further purification. Microbial cells employed in expression of proteins can be disrupted by any convenient method, including, but not limited to freeze-thaw cycling, sonication, mechanical disruption, and/or use of cell lysing agents, as well as many other suitable methods well known to those skilled in the art.

[0201] Engineered pantothenate kinase enzymes expressed in a host cell can be recovered from the cells and/or the culture medium using any one or more of the techniques known in the art for protein purification, including, among others, lysozyme treatment, sonication, filtration, salting-out, ultra-centrifugation, and chromatography. Suitable solutions for lysing and the high efficiency extraction of proteins from bacteria, such as E. coli, are commercially available under the trade name CelLytic BTM (Sigma-Aldrich). Thus, in some embodiments, the resulting polypeptide is recovered/isolated and optionally purified by any of a number of methods known in the art. For example, in some embodiments, the polypeptide is isolated from the nutrient medium by conventional procedures including, but not limited to, centrifugation, filtration, extraction, spray-drying, evaporation, chromatography (e.g., ion exchange, affinity, hydrophobic interaction, chromatofocusing, and size exclusion), or precipitation. In some embodiments, protein refolding steps are used, as desired, in completing the configuration of the mature protein. In addition, in some embodiments, high performance liquid chromatography (HPLC) is employed in the final purification steps. For example, in some embodiments, methods known in the art, find use in the present invention (See e.g., Parry et al., Biochem. J., 353:117 [2001]; and Hong et al., Appl. Microbiol. Biotechnol., 73:1331 [2007], both of which are incorporated herein by reference). Indeed, any suitable purification methods known in the art find use in the present invention.

[0202] Chromatographic techniques for isolation of the pantothenate kinase polypeptide include, but are not limited to reverse phase chromatography high performance liquid chromatography, ion exchange chromatography, gel electrophoresis, and affinity chromatography. Conditions for purifying a particular enzyme will depend, in part, on factors such as net charge, hydrophobicity, hydrophilicity, molecular weight, molecular shape, etc., are known to those skilled in the art.

[0203] In some embodiments, affinity techniques find use in isolating the improved pantothenate kinase enzymes. For affinity chromatography purification, any antibody which specifically binds the pantothenate kinase polypeptide may be used. For the production of antibodies, various host animals, including but not limited to rabbits, mice, rats, etc., may be immunized by injection with the pantothenate kinase. The pantothenate kinase polypeptide may be attached to a suitable carrier, such as BSA, by means of a side chain functional group or linkers attached to a side chain functional group. Various adjuvants may be used to increase the immunological response, depending on the host species, including but not limited to Freund's (complete and incomplete), mineral gels such as aluminum hydroxide, surface active substances such as lysolecithin, pluronic polyols, polyanions, peptides, oil emulsions, keyhole limpet hemocyanin, dinitrophenol, and potentially useful human adjuvants such as BCG (Bacillus Calmette Guerin) and Corynebacterium parvum.

[0204] In some embodiments, the pantothenate kinase variants are prepared and used in the form of cells expressing the enzymes, as crude extracts, or as isolated or purified preparations. In some embodiments, the pantothenate kinase variants are prepared as lyophilisates, in powder form (e.g., acetone powders), or prepared as enzyme solutions. In some embodiments, the pantothenate kinase variants are in the form of substantially pure preparations.

[0205] In some embodiments, the pantothenate kinase polypeptides are attached to any suitable solid substrate. Solid substrates include but are not limited to a solid phase, surface, and/or membrane. Solid supports include, but are not limited to organic polymers such as polystyrene, polyethylene, polypropylene, polyfluoroethylene, polyethyleneoxy, and polyacrylamide, as well as co-polymers and grafts thereof. A solid support can also be inorganic, such as glass, silica, controlled pore glass (CPG), reverse phase silica or metal, such as gold or platinum. The configuration of the substrate can be in the form of beads, spheres, particles, granules, a gel, a membrane or a surface. Surfaces can be planar, substantially planar, or non-planar. Solid supports can be porous or non-porous, and can have swelling or non-swelling characteristics. A solid support can be configured in the form of a well, depression, or other container, vessel, feature, or location. A plurality of supports can be configured on an array at various locations, addressable for robotic delivery of reagents, or by detection methods and/or instruments.

[0206] In some embodiments, immunological methods are used to purify pantothenate kinase variants. In one approach, antibody raised against a variant pantothenate kinase polypeptide (e.g., against a polypeptide comprising SEQ ID NO: 4, SEQ ID NO: 44, SEQ ID NO: 320, and/or SEQ ID NO: 526, and/or an immunogenic fragment thereof) using conventional methods is immobilized on beads, mixed with cell culture media under conditions in which the variant pantothenate kinase is bound, and precipitated. In a related approach, immunochromatography finds use.

[0207] In some embodiments, the variant pantothenate kinases are expressed as a fusion protein including a non-enzyme portion. In some embodiments, the variant pantothenate kinase sequence is fused to a purification facilitating domain. As used herein, the term “purification facilitating domain” refers to a domain that mediates purification of the polypeptide to which it is fused. Suitable purification domains include, but are not limited to metal chelating peptides, histidine-tryptophan modules that allow purification on immobilized metals, a sequence which binds glutathione (e.g., GST), a hemagglutinin (HA) tag (corresponding to an epitope derived from the influenza hemagglutinin protein; See e.g., Wilson et al., Cell 37:767 [1984]), maltose binding protein sequences, the FLAG epitope utilized in the FLAGS extension/affinity purification system (e.g., the system available from Immunex Corp), and the like. One expression vector contemplated for use in the compositions and methods described herein provides for expression of a fusion protein comprising a polypeptide of the invention fused to a polyhistidine region separated by an enterokinase cleavage site. The histidine residues facilitate purification on IMIAC (immobilized metal ion affinity chromatography; See e.g., Porath et al., Prot. Exp. Purif., 3:263-281 [1992]) while the enterokinase cleavage site provides a means for separating the variant pantothenate kinase polypeptide from the fusion protein. pGEX vectors (Promega) may also be used to express foreign polypeptides as fusion proteins with glutathione S-transferase (GST). In general, such fusion proteins are soluble and can easily be purified from lysed cells by adsorption to ligand-agarose beads (e.g., glutathione-agarose in the case of GST-fusions) followed by elution in the presence of free ligand.

[0208] Accordingly, in another aspect, the present invention provides methods of producing the engineered enzyme polypeptides, where the methods comprise culturing a host cell capable of expressing a polynucleotide encoding the engineered enzyme polypeptide under conditions suitable for expression of the polypeptide. In some embodiments, the methods further comprise the steps of isolating and/or purifying the enzyme polypeptides, as described herein.

[0209] Appropriate culture media and growth conditions for host cells are well known in the art. It is contemplated that any suitable method for introducing polynucleotides for expression of the enzyme polypeptides into cells will find use in the present invention. Suitable techniques include, but are not limited to electroporation, biolistic particle bombardment, liposome mediated transfection, calcium chloride transfection, and protoplast fusion.

[0210] Various features and embodiments of the present invention are illustrated in the following representative examples, which are intended to be illustrative, and not limiting.

### EXPERIMENTAL

[0211] The following Examples, including experiments and results achieved, are provided for illustrative purposes only and are not to be construed as limiting the present invention. Indeed, there are various suitable sources for many of the reagents and equipment described below. It is not intended that the present invention be limited to any particular source for any reagent or equipment item.

[0212] In the experimental disclosure below, the following abbreviations apply: M (molar); mM (millimolar), uM and μM (micromolar); nM (nanomolar); mol (moles); gm and g (gram); mg (milligrams); ug and μg (micrograms); L and 1 (liter); ml and mL (milliliter); cm (centimeters); mm (millimeters); um and μtri (micrometers); sec. (seconds); min(s) (minute(s)); h(s) and hr(s) (hour(s)); U (units); MW (molecular weight); rpm (rotations per minute); psi and PSI (pounds per square inch); ° C. (degrees Centigrade); RT and rt (room temperature); RH (relative humidity); CV (coefficient of variability); CAM and cam (chloramphenicol); PMBS (polymyxin B sulfate); IPTG (isopropyl β-D-1-thiogalactopyranoside); LB (Luria broth); TB (terrific broth); SFP (shake flask powder); CDS (coding sequence); DNA (deoxyribonucleic acid); RNA (ribonucleic acid); nt (nucleotide; polynucleotide); aa (amino acid; polypeptide); E. coli W3110 (commonly used laboratory E. coli strain, available from the Coli Genetic Stock Center [CGSC], New Haven, CT); HTP (high throughput); HPLC (high pressure liquid chromatography); HPLC-UV (HPLC-Ultraviolet Visible Detector); 1H NMR (proton nuclear magnetic resonance spectroscopy); FIOPC (fold improvements over positive control); Sigma and Sigma-Aldrich (Sigma-Aldrich, St. Louis, MO; Difco (Difco Laboratories, BD Diagnostic Systems, Detroit, MI); Microfluidics (Microfluidics, Westwood, MA); Life Technologies (Life Technologies, a part of Fisher Scientific, Waltham, MA); Amresco (Amresco, LLC, Solon, OH); Carbosynth (Carbosynth, Ltd., Berkshire, UK); Varian (Varian Medical Systems, Palo Alto, CA); Agilent (Agilent Technologies, Inc., Santa Clara, CA); Infors (Infors USA Inc., Annapolis Junction, MD); and Thermotron (Thermotron, Inc., Holland, MI).

### Example 1

### E. coli Expression Hosts Containing Recombinant PanK Genes

[0213] The initial engineered PanK enzyme used to produce the variants of the present invention, SEQ ID NO: 4, was cloned into the expression vector pCK110900 (See, FIG. 3 of US Pat. Appln. Publn. No. 2006/0195947) operatively linked to the lac promoter under control of the lacl repressor. The expression vector also contains the P15a origin of replication and the chloramphenicol resistance gene. The resulting plasmids were transformed into E. coli W3110, using standard methods known in the art. The transformants were isolated by subjecting the cells to chloramphenicol selection, as known in the art (See e.g., U.S. Pat. No. 8,383,346 and WO2010/144103).

### Example 2

### Preparation of HTP PanK-Containing Wet Cell Pellets

[0214] E. coli cells containing recombinant PanK-encoding genes from monoclonal colonies were inoculated into 180 μl LB containing 1% glucose and 30 μg/mL chloramphenicol (CAM) in the wells of 96-well, shallow-well microtiter plates. The plates were sealed with O₂-permeable seals, and cultures were grown overnight at 30° C., 200 rpm, and 85% humidity. Then, 10 μl of each of the cell cultures were transferred into the wells of 96-well, deep-well plates containing 390 mL TB and 30 μg/mL CAM. The deep-well plates were sealed with O₂-permeable seals and incubated at 30° C., 250 rpm, and 85% humidity until OD₆₀₀ 0.6-0.8 was reached. The cell cultures were then induced by IPTG to a final concentration of 1 mM and incubated overnight under the same conditions as originally used. The cells were then pelleted using centrifugation at 4,000 rpm for 10 min. The supernatants were discarded, and the pellets were frozen at −80° C. prior to lysis.

### Example 3

### Preparation of HTP PanK-Containing Cell Lysates

[0215] First, 200 IA lysis buffer containing 20 mM potassium phosphate buffer, pH 7.5, 1 mg/mL lysozyme, and 0.5 mg/mL PMBS were added to the cell paste in each well, produced as described in Example 2. The cells were lysed at room temperature for 2 hours with shaking on a bench top shaker. The plate was then centrifuged for 15 min at 4,000 rpm and 4° C. The clear supernatants were used in biocatalytic reactions to determine their activity levels.

### Example 4

### Preparation of Lyophilized Lysates from Shake Flask (SF) Cultures

[0216] Selected HTP cultures grown as described above were plated onto LB agar plates with 1% glucose and 30 μg/ml CAM and were grown overnight at 37° C. A single colony from each culture was transferred to 6 ml of LB with 1% glucose and 30 μg/ml CAM. The cultures were grown for 18 h at 30° C., 250 rpm, and subcultured approximately 1:50 into 250 ml of TB containing 30 ρg/ml CAM, to a final OD₆₀₀ of 0.05. The cultures were grown for approximately 195 minutes at 30° C. and 250 rpm, to an OD₆₀₀ between 0.6-0.8 and induced with 1 mM IPTG. The cultures were then grown for 20 h at 30° C. and 250 rpm. The cultures were centrifuged at 4,000 rpm for 20 min. The supernatant was discarded, and the pellets were resuspended in 30 ml of 25 mM potassium phosphate buffer, pH 7.5. The cells were pelleted (4,000 rpm for 20 min) and frozen at −80° C. for 120 minutes. Frozen pellets were resuspended in 30 ml of 25 mM potassium phosphate buffer, pH 7.5, and lysed using a Microfluidizer system (Microfluidics) at 18,000 psi. The lysates were pelleted (10,000 rpm for 60 min), and the supernatants were frozen and lyophilized to generate shake flake (SF) enzymes.

### Example 5

### Improvements Over SEQ ID NO: 4 in the Phosphorylation Activity of 2-Ethynyl Glycerol

[0217] SEQ ID NO: 4 was selected as the parent enzyme after screening variants disclosed in U.S. patent application Ser. No. 16/460,147 for the phosphorylation activity of ethynyl glycerol substrate. Libraries of engineered genes were produced using well established techniques (e.g., saturation mutagenesis, recombination of previously identified beneficial mutations). The polypeptides encoded by each gene were produced in HTP as described in Example 2, and the soluble lysate was generated as described in Example 3. Each variant was screened in a 50 μL reaction that comprised of 50 mg/mL 2-ethynylglycerol (EGO) substrate, 0.1 mol % ATP, 0.25 mg/mL acetate kinase (SEQ ID NO: 632), 1.25 eq (NH₄)₂ SEQ ID NO: 4 was selected as the parent enzyme after screening variants disclosed in U.S. patent application Ser. No. 16/460,147 for the phosphorylation activity of ethynyl glycerol substrate. Libraries of engineered genes were produced using well established techniques (e.g., saturation mutagenesis, recombination of previously identified beneficial mutations). The polypeptides encoded by each gene were produced in HTP as described in Example 2, and the soluble lysate was generated as described in Example 3. Each variant was screened in a 50 μL reaction that comprised of 50 mg/mL 2-ethynylglycerol (EGO) substrate, 0.1 mol % ATP, 0.25 mg/mL acetate kinase (SEQ ID NO: 632), 1.25 eq (NH₄)₂acetyl phosphate (AcP), 10 mM MgCl₂ in 50 mM Bis-Tris buffer, pH 7.5 and 32× diluted soluble lysate for 15 hours at 30° C. The 96-well plates were heat-sealed and incubated in a Thermotron® shaker at 600 rpm to produce a chromophore containing species and enable simple reaction monitoring. The reaction samples were derivatized using tripotassium 5,5′,5″ 42,2′,2″-nitrilotris(methylene-tris(1H-benzimidazole-2,1-diyOltripentanoate hydrate ((BimC4A)3) at the following conditions 5 equivalents (eq) benzyl azide, 5 mol % Copper sulfate, 7.5 mol % (BimC4A)3, 20 mol % sodium ascorbate, 9:1 water:DMSO to achieve click chemistry. Post reaction, 5 uL of reaction were combined with 220 uL of (BimC4A)3 derivatization solution in new 96-well plates. The click chemistry reaction was incubated for 1 hour at 45° C. The samples were then filtered by centrifugation using 0.22 micron 96-well filter plates in preparation for analysis by UPLC-UV (Example 9) or RapidFire MS (Example 10).

[0218] Activity relative to SEQ ID NO: 4 (Activity FIOP) was calculated as the percent conversion of the product formed by the variant over the percent conversion produced by SEQ ID NO: 4 and shown in Table 5.1. The percent conversion was calculated by dividing the area of the product peak by the sum of the areas of the substrate, product and impurities/side product peaks as observed by the UPLC-UV analysis (Example 9).

TABLE 5.1
Activity of Variants Relative to SEQ ID NO: 4

| | | Activity FIOP 1 |
|---|---|---|
| SEQ ID NO: | Amino Acid Differences | (Relative to |
| (nt/aa) | (Relative to SEQ ID NO: 4) | SEQ ID NO: 4) |
| 5/6 | K154H | +++ |
| 7/8 | H141L | + |
| 9/10 | I287L | + |
| 11/12 | Y250F | + |
| 13/14 | I251L | + |
| 15/16 | K289A | + |
| 17/18 | K154R | + |
| 19/20 | I103V | + |
| 21/22 | K297V | + |
| 23/24 | E290G | + |
| 25/26 | T135S | + |
| 27/28 | I193V | + |
| 29/30 | Q247T | + |
| 31/32 | S216G | + |
| 33/34 | Y238F | + |
| 35/36 | K289S | + |
| 37/38 | T248S | + |
| 39/40 | T248A | + |
| 41/42 | K297R | + |
| 43/44 | I103V/T135S/H141L | +++ |
| 45/46 | T135S/H141L/Y238F | ++ |
| 47/48 | A315L | + |
| 49/50 | I103V/H141L/S216G | + |
| 51/52 | V33I | + |
| 53/54 | N79S | + |
| 55/56 | T135S/I193V/Y238F/K289A/ | + |
| | M291K | |
| 57/58 | I103V/H141L/Y238F | + |
| 59/60 | S293L | + |
| 61/62 | R129S | + |
| 63/64 | T135S | + |
| 65/66 | R129G | + |
| 67/68 | A120T | + |
| 69/70 | R96P | + |
| 71/72 | V227T | + |
| 73/74 | D195A | + |
| 75/76 | I103V/T135S/S216G | + |
| 77/78 | P194H | + |
| 79/80 | R34A | + |
| 81/82 | M19L | + |
| 83/84 | H222G | + |
| 85/86 | I103V/H141L/I193V/S216G/ | + |
| | Y238F | |
| 87/88 | I103V/T135S | + |
| 89/90 | I103V/H141L | + |
| 91/92 | T135S/R323C | + |
| 93/94 | M218C | + |
| 95/96 | I193V/S216G | + |
| 97/98 | E63L | + |
| 99/100 | K274A | + |
| 101/102 | T135S/I251L/R323C | + |
| 103/104 | A31R | + |
| 105/106 | D197G | + |
| 107/108 | T135S/H141L/Q298A/R323C | + |
| 109/110 | R82T | + |
| 111/112 | T286D | + |
| 113/114 | N37F | + |
| 115/116 | S77L | + |
| 117/118 | N73G | + |
| 119/120 | T135S/D219G | + |
| 121/122 | H141L/K297V | + |
| 123/124 | D195G | + |
| 125/126 | D44W | + |
| 127/128 | M291G | + |
| 129/130 | P221E | + |
| 131/132 | R130Y | + |
| 133/134 | T17V | + |
| 135/136 | D35R | + |
| 137/138 | Q85S | + |
| 139/140 | R124G | + |
| 141/142 | P126S | + |
| 143/144 | N79A | + |
| 145/146 | P126V | + |
| 147/148 | I46K | + |
| 149/150 | H141L/I193V/I251L/R323C | + |
| 151/152 | T135S/T248A/I251L/M291K/ | + |
| | K297R | |
| 153/154 | F74L | + |
| 155/156 | H128S | + |
| 157/158 | D197V | + |
| 159/160 | S308A | + |
| 161/162 | P221S | + |
| 163/164 | K198R | + |
| 165/166 | H141L/I251L/R323C | + |
| 167/168 | P126Q | + |
| 169/170 | V145I | + |
| 171/172 | G91C | + |
| 173/174 | H141L/R323C | + |
| 175/176 | T135S/Y238F/M291K | + |
| 177/178 | H141L/I251L | + |
| 179/180 | N79Y | + |
| 181/182 | I251L | + |
| 183/184 | G94S | + |
| 185/186 | H225Y | + |
| 187/188 | I103V/T135S/M291K | + |
| 189/190 | V233C | + |
| 191/192 | L80E | + |
| 193/194 | Q95G | + |
| 195/196 | H164P | + |
| 197/198 | R323C | + |
| 199/200 | I103V/S216G/Y238F | + |
| 201/202 | D35S | + |
| 203/204 | I103V | + |
| 205/206 | A120L | + |
| 207/208 | I76V | + |
| 209/210 | D26A | + |
| 211/212 | D26T | + |

1 Levels of increased activity were determined relative to the reference polypeptide of SEQ ID NO: 4 and defined as follows: “+” > than 1-fold but less than 2.0-fold increased activity; “++” > than 2.0-fold but less than 4-fold increased activity; “+++” > than 4-fold increased activity

### Example 6

### Improvements Over SEQ ID NO: 44 in the Phosphorylation Activity of 2-Ethynyl Glycerol

[0219] SEQ ID NO: 44 was selected as the parent enzyme for this round of directed evolution. Libraries of engineered genes were produced using well established techniques (e.g., saturation mutagenesis, recombination of previously identified beneficial mutations). The polypeptides encoded by each gene were produced in HTP as described in Example 2, and the soluble lysate was generated as described in Example 3. Each variant was screened in a 50 μL reaction that comprised of 50 mg/mL 2-ethynylglycerol (EGO) substrate, 0.1 mol % ATP, 0.25 mg/mL acetate kinase (SEQ ID NO: 632), 1.25 eq (NH₄)₂AcP, 10 mM MgCl₂ in 50 mM Bis-Tris buffer, pH 7.0 (final master mix pH 6.8) and 64× diluted soluble lysate for 15 hours at 30° C. The 96-well plates were heat-sealed and incubated in a Thermotron® shaker at 600 rpm. To produce a chromophore containing species and enable simple reaction monitoring, the reaction samples were derivatized using tripotassium 5,5′,5″-[2,2′,2″-nitrilotris(methylene-tris(1H-benzimidazole-2,1-diyl)]tripentanoate hydrate ((BimC4A)3) at the following conditions 5 eq benzyl azide, 5 mol % Copper sulfate, 7.5 mol % (BimC4A)3, 20 mol % sodium ascorbate, 9:1 water:DMSO to achieve click chemistry. Post reaction, 5 uL of reaction were combined with 220 uL of (BimC4A)3 derivatization solution in new 96-well plates. The click chemistry reaction was incubated for 1 hour at 45° C. The samples were then filtered by centrifugation using 0.22 micron 96-well filter plates in preparation for analysis by UPLC-UV (Example 9) or RapidFire MS (Example 10).

[0220] Activity relative to SEQ ID NO: 44 (Activity FIOP) was calculated as the click product peak intensity, of each variant, per click product peak intensity of SEQ ID NO: 44 using Analytical Method 10.1, and the results are shown in Table 6.1.

TABLE 6.1
Activity of Variants Relative to SEQ ID NO: 44

| SEQ ID | Amino Acid Differences | Activity FIOP ¹ (Relative |
|---|---|---|
| NO: (nt/aa) | (Relative to SEQ ID NO: 44) | to SEQ ID NO: 44) |
| 213/214 | D35R/Q85S/M218C/H225Y | +++ |
| 215/216 | D35R/M218C/S308A | +++ |
| 217/218 | D35R/D197V/K274A | +++ |
| 219/220 | D35R/F74L/M218C | ++ |
| 221/222 | M19L/D35R/D197G/M218C/L275M | ++ |
| 223/224 | T20G/H164S/N179V/S308M/E320K | ++ |
| 225/226 | T20G/E59R/A120V/H164S/T263M/K282A | ++ |
| 227/228 | T20G/S308M | ++ |
| 229/230 | F74L/L141H | ++ |
| 231/232 | S77L/M218C | ++ |
| 233/234 | E59R/A120V | ++ |
| 235/236 | T17V/E63L/R96P | ++ |
| 237/238 | T20G/H164S | + |
| 239/240 | M19L/Q85S/V145I/D197G/M218C/S308A | + |
| 241/242 | T20G/K282A | + |
| 243/244 | T17V/P126V/R129S/R130Y/H164P | + |
| 245/246 | T17V/I46K/H128S/R129G/R130Y/H164P/I193V | + |
| 247/248 | T17V/I46K/E63L/R96P | + |
| 249/250 | T263M | + |
| 251/252 | H164S/P221C/S308M | + |
| 253/254 | M19L/L141H | + |
| 255/256 | T17V/P126Q/R129G/H164P | + |
| 257/258 | T20G/E59R/N93G | + |
| 259/260 | I46K/H164P | + |
| 261/262 | D35R/L141H/D195G/M218C/K274A | + |
| 263/264 | E59R | + |
| 265/266 | T17V/E63L/H164P | + |
| 267/268 | M19L/F74L/V145I | + |
| 269/270 | T17V/I46K/E63L | + |
| 271/272 | V33I/D35S/I76V/L80E/P126S/P221E/H222G/V227T | + |
| 273/274 | T17V/R34A/R96P/H128S/R129G/H164P | + |
| 275/276 | L141H/D195G/D197G/M218C | + |
| 277/278 | A31R/I76V/N79A/A120T/P126S/S293L | + |
| 279/280 | A120V/H164S/K282A/E321L | + |
| 281/282 | A31R/V33I/D35S/A120T/P126S/V227T | + |
| 283/284 | T20G/E59A/N93G/L141H/E321L | + |
| 285/286 | D35R/V145I/T286D | + |
| 287/288 | S308A | + |
| 289/290 | R34A/I46K/E63L/H164P | + |
| 291/292 | T17V/I46K/E63L/R96P | + |
| 293/294 | D35R | + |
| 295/296 | T17V/E63L/R96P/H164P | + |
| 297/298 | T17V/I46K/H164P | + |
| 299/300 | T17V/E63L/N79S/H128S/R129G/R130Y/H164P | + |
| 301/302 | M218C | + |
| 303/304 | H225Y | + |
| 305/306 | Q16R/N93G/A120V/P221C/S308M | + |
| 307/308 | T17V/N79S/H128S/R129S/R130Y | + |
| 309/310 | H128S/R129G/R130Y | + |
| 311/312 | D35S/I76V/L80E/P126S | + |
| 313/314 | R34A/N79S/P126Q/H128S/R130Y | + |
| 315/316 | I46K/N79S | + |
| 317/318 | T17V/P126V | + |
| 319/320 | V33I/D35S/P126S/H222G/V227T | + |
| 321/322 | D35S/G94S/A120T/P126S/S293L | + |
| 323/324 | T17V/E63L | + |
| 325/326 | E63L/H164P | + |
| 327/328 | N79S/P126V/H164P | + |
| 329/330 | D26T/V33I/L80E/P126S/M291G/S293L | + |
| 331/332 | R34A/H164P | + |
| 333/334 | M19L/S77L/L141H/M218C/H225Y | + |
| 335/336 | G94S/P126S/S293L | + |
| 337/338 | I46K/I193V | + |
| 339/340 | V33I/N79A/P126S/P221E/V227T/S293L | + |
| 341/342 | I46K/H128S/R129G/H164P | + |
| 343/344 | V33F/D35S/P126S/S293P | + |
| 345/346 | P126V/R129G/H164P | + |
| 347/348 | T17V/E63L/N79S | + |
| 349/350 | A32S/I46K | + |
| 351/352 | L80E/P126S/P221E/V227T | + |
| 353/354 | T17V/E63L/I193V | + |
| 355/356 | D35R/S77L/M218C | + |
| 357/358 | D26T/A31R/V33I/D35S/I76V/N79A/ | + |
| | G94S/P221E/S293L | |
| 359/360 | V33I/I76V/N79A | + |
| 361/362 | I46K/R96P/H164P | + |
| 363/364 | R34A/I46K/N79S/H164P | + |
| 365/366 | R34A/E63L/P126V/R129S/I193V | + |
| 367/368 | I46K/E63L | + |
| 369/370 | K274A | + |
| 371/372 | A31R/V33I/D35S/I76V/L141H/S293L | + |
| 373/374 | E63L | + |
| 375/376 | M19L/L141H/H225Y | + |
| 377/378 | A31R/V33I/A120T | + |
| 379/380 | D26T/A31R/V33I/I76V/N79A | + |
| 381/382 | V33I/D35S/P126S/K198R/S293L | + |
| 383/384 | A31R/V33I/I76V/N79A/L80E/G94S/M291G | + |
| 385/386 | Q16R/L141H/N179V/K282A | + |
| 387/388 | S308M | + |
| 389/390 | D26T/A31R/A120T | + |
| 391/392 | I46K/H164P/I193V | + |
| 393/394 | I76V/N79A/L80E/A120T | + |
| 395/396 | T17V/I46K/E63L/H164P | + |
| 397/398 | F74L/Q85S/V145I | + |
| 399/400 | A31R/I76V/N79A/S293L | + |
| 401/402 | I46K/R129G | + |
| 403/404 | D26T/V33I/D35S/P126S/H222G/M291G | + |
| 405/406 | D35R/F74L/S77L/D197V/H225Y | + |
| 407/408 | R34A/I46K/E63L | + |
| 409/410 | P126V/H128S/R129G/I193V | + |
| 411/412 | T17V/R34A/I46K | + |
| 413/414 | A31R/V33I/D35S/I76V/N79A/G91C/M291G | + |
| 415/416 | E63L/I193V | + |
| 417/418 | V33I/D35S/P221E/H222G | + |
| 419/420 | D35R/Q85S/M218C/K274A | + |
| 421/422 | D26T/D35S/A120T/H222G/V227T/S293L | + |
| 423/424 | D35S/I76V | + |
| 425/426 | T17V | + |
| 427/428 | T17V/E63L/R129S/R130Y | + |
| 429/430 | V33I/I76V/N79A/P126S | + |
| 431/432 | D26T/A31R/V33I/I76V/N79A/G94S | + |
| 433/434 | R34A/I46K/N79S/R96P/P126V | + |
| 435/436 | A31R/D35S/L80E/G94S/P126S/L141H/S293L | + |
| 437/438 | T17V/I46K/P126V/H128S/R129S/H164P | + |
| 439/440 | I46K/N79S/P126V/I193V | + |
| 441/442 | V33I/D35S/I76V/N79A/A120T/L141H/K198R/P221E | + |
| 443/444 | G94S/Q95G/A120T/M291G | + |
| 445/446 | N79S/R96P/P126Q/R129S | + |
| 447/448 | V33I/D35S | + |
| 449/450 | D35R/Q85S/L141H/M218C | + |
| 451/452 | T17V/I46K | + |
| 453/454 | G94S/S293L | + |
| 455/456 | R34A/I46K/H164P | + |
| 457/458 | R34A/I46K | + |
| 459/460 | A31R/V33I/D35S/P126S | + |
| 461/462 | H164S | + |
| 463/464 | R34A | + |
| 465/466 | M19L/D35R/Q85S/K274A | + |
| 467/468 | D26T/D35S/N79A/A120T/P126S/P194H/K198R | + |
| 469/470 | T17V/R34A | + |
| 471/472 | A31R/V331/I76V/N79A/Q95G | + |
| 473/474 | D26T/V33I/G94S/S293L | + |
| 475/476 | D35R/K274A | + |
| 477/478 | D35R/Q85S | + |
| 479/480 | A120V | + |
| 481/482 | D26T/A31R/V33I/D35S/A120T/L141H/S293L | + |
| 483/484 | D35S/I76V/N79A/L80E/P126S | + |
| 485/486 | M19L/F74L/S77L/L141H/M218C | + |
| 487/488 | S77L/Q85S/V145I | + |
| 489/490 | D26T/D35S/P126S | + |
| 491/492 | V33I/D35S/G94S/P126S/L141H | + |
| 493/494 | M19L | + |
| 495/496 | V33I/D35S/I76V/L80E/S293L | + |
| 497/498 | R34A/I46K/R48C | + |
| 499/500 | I46K | + |

¹ Levels of increased activity were determined relative to the reference polypeptide of SEQ ID NO: 44 and defined as follows: “+” > than 1-fold but less than 2.0-fold increased activity; “++” > than 2.0-fold but less than 4-fold increased activity; “+++” > than 4-fold increased activity

### Example 7

### Improvements Over SEQ ID NO: 320 in the Phosphorylation Activity of 2-Ethynyl Glycerol and Stability of the PanK Enzyme

[0221] SEQ ID NO: 320 was selected as the parent enzyme for this round of directed evolution. Libraries of engineered genes were produced using well established techniques (e.g., saturation mutagenesis, recombination of previously identified beneficial mutations). The polypeptides encoded by each gene were produced in HTP as described in Example 2, and the soluble lysate was generated as described in Example 3. Each variant was screened in a 50 μL reaction that comprised of 50 mg/mL 2-ethynylglycerol (EGO) substrate, 0.1 mol % ATP, 0.125 mg/mL acetate kinase (SEQ ID NO: 634), 1.25 eq (NH₄)₂AcP, 10 mM MgCl₂ in 50 mM Bis-Tris buffer, pH 7.5 (final master mix pH 8.0) and 64× diluted soluble lysate for 15 hours at 30° C. For stability testing, the soluble lysates, generated as described in Example 3, were pre-incubated at 40° C. for 1.5 hours and then diluted 32× for screening. The 96-well plates were heat-sealed and incubated in a Thermotron® shaker at 600 rpm. To produce a chromophore containing species and enable simple reaction monitoring, the reaction samples were derivatized using tripotassium 5,5′,5″-[2,2′,2″-nitrilotris(methylene-tris(1H-benzimidazole-2,1-diyl)]tripentanoate hydrate ((BimC4A)3) at the following conditions 5 eq benzyl azide, 5 mol % Copper sulfate, 7.5 mol % (BimC4A)3, 20 mol % sodium ascorbate, 9:1 water:DMSO to achieve click chemistry. Post reaction, 5 uL of reaction were combined with 220 uL of (BimC4A)3 derivatization solution in new 96-well plates. The click chemistry reaction was incubated for 1 hour at 45° C. The samples were then filtered by centrifugation using 0.22 micron 96-well filter plates in preparation for analysis by UPLC-UV (Example 9) or RapidFire MS (Example 10).

[0222] Activity and stability relative to SEQ ID NO: 320 (Activity FIOP) were calculated as the click product peak intensity, of each variant, per click product peak intensity of SEQ ID NO: 320 using Analytical method 10.1, and the results are shown in Table 7.1.

TABLE 7.1
Activity and Stability of Variants Relative to SEQ ID NO: 320

| | | Activity FIOP ¹ | Stability FIOP ² |
|---|---|---|---|
| SEQ ID | Amino Acid Differences | (Relative to SEQ | (Relative to SEQ |
| NO: (nt/aa) | (Relative to SEQ ID NO: 320) | ID NO: 320) | ID NO: 320) |
| 501/502 | T20G/G94S/A120T | + | + |
| 503/504 | R48C/E63L | + | + |
| 505/506 | T20G/R48C/M218C/T227V | + | + |
| 507/508 | G94S/A120T | + | + |
| 509/510 | T20G/A31R/S35D/R48C/E63L/F74L/ | + | + |
| | G94S/A120T/H164P | | |
| 511/512 | E63L | + | + |
| 513/514 | E63L/A120T/D197G/M218C/L275M | + | + |
| 515/516 | E63L/R129S/V145I | + | + |
| 517/518 | R48C/E63L/V145I | + | + |
| 519/520 | T20G/A120T/V145I/D197G/T227V | ++ | + |
| 521/522 | R48C/E63L/F74L/N79S/A120T/R129G/ | + | + |
| | T227V/K282A | | |
| 523/524 | F74L/N79A/G94S/L275M | + | + |
| 525/526 | R48C/E63L/G94S/L275M | ++ | + |
| 527/528 | T20G/S35D/A120T/D197G | + | + |
| 529/530 | E63L/M218C/L275M/K282A | + | + |
| 531/532 | T20G/R48C/E63L/G94S/A120T/V145I/ | + | + |
| | D197G/M218C/T227V | | |
| 533/534 | T20G/A31R/S35D/F74L/N79A/H164S/ | + | + |
| | M218C/H225Y/K282A | | |
| 535/536 | T20G/D197G/H225Y/T227V | + | + |
| 537/538 | Q95D | + | + |
| 539/540 | Q95E | + | |
| 541/542 | K289C | | + |
| 543/544 | I33V | | + |
| 545/546 | G271M | + | + |
| 547/548 | Q24H | | + |
| 549/550 | P178H | | + |
| 551/552 | G196I | + | + |
| 553/554 | K277R | + | + |
| 555/556 | P178D | + | + |
| 557/558 | Q24V | + | ++ |
| 559/560 | V201G | | + |
| 561/562 | P221G | | ++ |
| 563/564 | R130L | | + |
| 565/566 | I46A | | + |
| 567/568 | S293Y | + | + |
| 569/570 | E321L | + | + |
| 571/572 | R149A | ++ | + |
| 573/574 | H164G | ++ | + |
| 575/576 | Q298E | ++ | + |
| 577/578 | K282D | + | ++ |
| 579/580 | S314G | ++ | + |
| 581/582 | Q298D | + | ++ |
| 583/584 | R48V | + | |
| 585/586 | G271C | + | + |

¹ Levels of increased activity were determined relative to the reference polypeptide of SEQ ID NO: 320 and defined as follows: “+” > than 1-fold but less than 1.75-fold increased activity; “++” > than 1.75-fold
² Levels of increased stability were determined relative to the reference polypeptide of SEQ ID NO: 320 and defined as follows: “+” > than 1-fold but less than 1.75-fold increased activity; “++” > than 1.75-fold

### Example 8

### Improvements Over SEQ ID NO: 526 in the Phosphorylation Activity of 2-Ethynyl Glycerol and Stability of the PanK Enzyme

[0223] SEQ ID NO: 526 was selected as the parent enzyme for this round of directed evolution. Libraries of engineered genes were produced using well established techniques (e.g., saturation mutagenesis, recombination of previously identified beneficial mutations). The polypeptides encoded by each gene were produced in HTP as described in Example 2, and the soluble lysate was generated as described in Example 3. Each variant was screened in a 50 μL reaction that comprised of 50 mg/mL 2-ethynylglycerol (EGO) substrate, 0.1 mol % ATP, 0.125 mg/mL acetate kinase (SEQ ID NO: 634), 1.25 eq (NH₄)₂AcP, 10 mM MgCl₂ in 50 mM Bis-Tris buffer, pH 7.5 (final master mix pH 8.0) and 128× diluted soluble lysate for 15 hours at 30° C. For stability testing, the soluble lysates, generated as described in Example 3, were pre-incubated at 45° C. for 1.5 hours and then diluted 64× for screening. The 96-well plates were heat-sealed and incubated in a Thermotron® shaker at 600 rpm. To produce a chromophore containing species and enable simple reaction monitoring, the reaction samples were derivatized using tripotassium 5,5′,5″-[2,2′,2″-nitrilotris(methylene-tris(1H-benzimidazole-2,1-diyl)]tripentanoate hydrate ((BimC4A)3) at the following conditions 5 eq benzyl azide, 5 mol % Copper sulfate, 7.5 mol % (BimC4A)3, 20 mol % sodium ascorbate, 9:1 water:DMSO to achieve click chemistry. Post reaction, 5 uL of reaction were combined with 220 uL of (BimC4A)3 derivatization solution in new 96-well plates. The click chemistry reaction was incubated for 1 hour at 45° C. The samples were then filtered by centrifugation using 0.22 micron 96-well filter plates in preparation for analysis by UPLC-UV (Example 9) or RapidFire MS (Example 10).

[0224] Activity and stability relative to SEQ ID NO: 526 (Activity FIOP) were calculated as the click product peak intensity, of each variant, per click product peak intensity of SEQ ID NO: 526 using Analytical method 10.1, and the results are shown in Table 8.1.

TABLE 8.1
Activity and Stability of Variants Relative to SEQ ID NO: 526

| | | Activity FIOP ¹ | Stability FIOP ² |
|---|---|---|---|
| SEQ ID | Amino Acid Differences | (Relative to SEQ | (Relative to SEQ |
| NO: (nt/aa) | (Relative to SEQ ID NO: 526) | ID NO: 526) | ID NO: 526) |
| 587/588 | I33V/Q95N/A104T | ++ | + |
| 589/590 | P221G/K289C | ++ | + |
| 591/592 | Q24H/I46V/P221G | + | |
| 593/594 | Q24H/T227V | + | |
| 595/596 | I46V/Q95E/K282A | + | + |
| 597/598 | Q24H/I33V | + | + |
| 599/600 | C48V | + | + |
| 601/602 | V201G | + | + |
| 603/604 | P178D/S293Y/Q298D | + | + |
| 605/606 | Q95D/V201G/K282D/S293Y/S314G | + | + |
| 607/608 | Q24V/V201G/K282D | + | + |
| 609/610 | H164G/V201G/G271C/S314G | + | + |
| 611/612 | Q298D | + | + |
| 613/614 | Q24V/R149A/V201G/K282D | + | + |
| 615/616 | Q24V/Q95D/H164G/P178D/V201G/K282D | + | ++ |
| 617/618 | Q24V/P178D/V201G/G271C/K282D/ | + | + |
| | S293Y/Q298E/S314G | | |
| 619/620 | Q24V | + | + |
| 621/622 | Q24V/R149A/P178D/K282D/S293Y/ | + | + |
| | Q298E | | |
| 623/624 | K282D/S293Y/Q298E/S314G/E321L | + | + |
| 625/626 | V201G/K282D | + | + |
| 627/628 | Q24V/V201G/G271C/K282D/S293Y/ | + | + |
| | Q298E | | |
| 629/630 | Q24V/R149A/K282D/S314G | + | + |

¹ Levels of increased activity were determined relative to the reference polypeptide of SEQ ID NO: 526 and defined as follows: “+” > than 1.2-fold but less than 1.70-fold increased activity; “++” > than 1.70-fold
² Levels of increased stability were determined relative to the reference polypeptide of SEQ ID NO: 526 and defined as follows: “+” > than 1.2-fold but less than 1.70-fold increased activity; “++” > than 1.70-fold

### Example 9

### Analytical Detection of (BimC4A)3-Derived 2-Ethynylglycerol Phosphate by UPLC-UV

[0225] Data described in Example 5 was collected using the analytical method provided in Table 9.1. The method provided herein finds use in analyzing the variants produced using the present invention. However, it is not intended that present invention be limited to the methods described herein, as there are other suitable methods known in the art that are applicable to the analysis of the variants provided herein and/or produced using the methods provided herein.

TABLE 9.1
Analytical Method

| Instrument | Agilent 1290 - UPLC | | |
|---|---|---|---|
| Column | Waters Acquity HSS T3, 2.1 × 50 mm, 1.8 um | | |
| Mobile Phase | A: 0.1% formic acid in water; B: 0.1% formic | | |
| | acid in acetonitrile | | |
| Gradient | Time (min) | % A | % B |
| | 0 | 98 | 2 |
| | 0.1 | 98 | 2 |
| | 0.7 | 80 | 20 |
| | 1.1 | 0 | 100 |
| | 1.5 | 98 | 2 |
| | 2.0 | 98 | 2 |

| | |
|---|---|
| Flow Rate | 1.25 mL/min |
| Run Time | 2.0 min |
| Product Elution order | (BimC4A)3 -Derived 2-Ethynylglycerol |
| | phosphate: ~0.98 min 2- |
| | ethynylglycerol: ~1.35 min |
| Column Temperature | 40° C. |
| Injection Volume | 5 μL |
| Detection | UV 210 nm |

### Example 10

### Analytical Detection of (BimC4A)3-Derived 2-Ethynylglycerol Phosphate by Rapid Fire-MS

[0226] Data described in Examples 6, 7, and 8 were collected using the analytical method provided in Table 10.1. The method provided herein finds use in analyzing the variants produced using the present invention. However, it is not intended that present invention be limited to the methods described herein, as there are other suitable methods known in the art that are applicable to the analysis of the variants provided herein and/or produced using the methods provided herein.

TABLE 10.1
Analytical Method

| | |
|---|---|
| Instrument | Agilent RapidFire |
| Pump1 Buffer | 0.1% Formic water LCMS grade water; 1.5 mL/min flow rate |
| Pump2 Buffer | ACC Juice (50% water LCMS grade, 25% acetonitrile LCMS |
| | grade, 25% acetone GCMS grade) + 100 um ammonium acetate ; |
| | 1.25 mL/min flow rate |
| Pump3 Buffer | ACC Juice (50% water LCMS grade, 25% acetonitrile LCMS |
| | grade, 25% acetone GCMS grade) + 100 um ammonium acetate; |
| | 1.25 mL/min flow rate |
| Aqueous wash | Water |
| Organic wash | Acetonitrile |
| SPE cartridge | C18 |
| RF state 1 Aspirate | 600 ms |
| RF state 2 Load/Wash | 3000 ms |
| RF state 3 Extra Wash | 0 |
| RF state 4 Elute | 6500 ms |
| RF state 5 Reequilibrate | 1000 ms |

Agilent Jet Stream source parameters

| | |
|---|---|
| Drying gas temperature | 350° C. |
| Drying gas flow | 13 L/min |
| Nebulizer pressure | 45 psi |
| Sheath gas temperature | 330° C. |
| Sheath gas flow | 12 L/min |
| Capillary voltage | 2500 V |
| Nozzle voltage | 2500 V |

Agilent 6470 Triple Quadrupole MRM parameters

| Compound | Q1 | Q3 | Dwell | Fragmentor | CE | CAV |
|---|---|---|---|---|---|---|
| (BimC4A)3 -Derived 2- | 330 | 231.8 | 109 | 80 | 10 | 3 |
| Ethynylglycerol phosphate | | | | | | |
| (BimC4A)3 -Derived 2- | 330 | 214 | 109 | 80 | 10 | 3 |
| Ethynylglycerol phosphate | | | | | | |
| (BimC4A)3 -Derived 2- | 330 | 90.8 | 109 | 80 | 30 | 3 |
| Ethynylglycerol phosphate | | | | | | |

1. An engineered pantothenate kinase comprising a polypeptide sequence having at least 85%, 86%, 87%, 88%, 89%, 90%, 91%, 92%, 93%, 94%, 95%, 96%, 97%, 98%, 99%, or more sequence identity to SEQ ID NO: 4, SEQ ID NO: 44, SEQ ID NO: 320, and/or SEQ ID NO: 526, or a functional fragment thereof, wherein said engineered pantothenate kinase comprises at least one substitution or substitution set in said polypeptide sequence, and wherein the amino acid positions of said polypeptide sequence are numbered with reference to SEQ ID NO: 4, SEQ ID NO: 44, SEQ ID NO: 320, and/or SEQ ID NO: 526.

2. The engineered pantothenate kinase of claim 1, comprising a polypeptide sequence having at least 85%, 86%, 87%, 88%, 89%, 90%, 91%, 92%, 93%, 94%, 95%, 96%, 97%, 98%, 99%, or more sequence identity to SEQ ID NO: 4, or a functional fragment thereof, wherein said engineered pantothenate kinase comprises at least one substitution or substitution set in said polypeptide sequence, and wherein the amino acid positions of said polypeptide sequence are numbered with reference to SEQ ID NO: 4.

3. The engineered pantothenate kinase of claim 2, wherein said engineered pantothenate kinase comprises a polypeptide sequence having at least 85%, 86%, 87%, 88%, 89%, 90%, 91%, 92%, 93%, 94%, 95%, 96%, 97%, 98%, 99%, or more sequence identity to SEQ ID NO: 4, or a functional fragment thereof, and wherein said engineered pantothenate kinase comprises at least one substitution or substitution set at one or more positions selected from 103, 103/135/141, 17, 19, 26, 31, 33, 34, 35, 37, 44, 46, 63, 73, 74, 76, 77, 79, 80, 82, 85, 91, 94, 95, 96, 103/135, 103/135/216, 103/135/291, 103/141, 103/141/193/216/238, 103/141/216, 103/141/238, 103/216/238, 120, 124, 126, 128, 129, 130, 135, 135/141/238, 135/141/298/323, 135/193/238/289/291, 135/219, 135/238/291, 135/248/251/291/297, 135/251/323, 135/323, 141, 141/193/251/323, 141/251, 141/251/323, 141/297, 141/323, 145, 154, 164, 193, 193/216, 194, 195, 197, 198, 216, 218, 221, 222, 225, 227, 233, 238, 247, 248, 250, 251, 274, 286, 287, 289, 290, 291, 293, 297, 308, 315, and 323, and wherein the amino acid positions of said polypeptide sequence are numbered with reference to SEQ ID NO: 4.

4. (canceled)

5. The engineered pantothenate kinase of claim 1, wherein said engineered pantothenate kinase comprises a polypeptide sequence having at least 85%, 86%, 87%, 88%, 89%, 90%, 91%, 92%, 93%, 94%, 95%, 96%, 97%, 98%, 99%, or more sequence identity to SEQ ID NO: 44, or a functional fragment thereof, and wherein said engineered pantothenate kinase comprises at least one substitution or substitution set at one or more positions selected from 16/93/120/221/308, 16/141/179/282, 17, 17/34, 17/34/46, 17/34/96/128/129/164, 17/46, 17/46/63, 17/46/63/96, 17/46/63/164, 17/46/126/128/129/164, 17/46/128/129/130/164/193, 17/46/164, 17/63, 17/63/79, 17/63/79/128/129/130/164, 17/63/96, 17/63/96/164, 17/63/129/130, 17/63/164, 17/63/193, 17/79/128/129/130, 17/126, 17/126/129/130/164, 17/126/129/164, 19, 19/35/85/274, 19/35/197/218/275, 19/74/77/141/218, 19/74/145, 19/77/141/218/225, 19/85/145/197/218/308, 19/141, 19/141/225, 20/59/93, 20/59/120/164/263/282, 20/164, 20/164/179/308/320, 20/282, 20/308, 26/31/33/35/76/79/94/221/293, 26/31/33/35/120/141/293, 26/31/33/76/79, 26/31/33/76/79/94, 26/31/120, 26/33/35/126/222/291, 26/33/80/126/291/293, 26/33/94/293, 26/35/79/120/126/194/198, 26/35/120/222/227/293, 26/35/126, 31/33/35/76/79/91/291, 31/33/35/76/141/293, 31/33/35/120/126/227, 31/33/35/126, 31/33/76/79/80/94/291, 31/33/76/79/95, 31/33/120, 31/35/80/94/126/141/293, 31/76/79/120/126/293, 31/76/79/293, 32/46, 33/35, 33/35/76/79/120/141/198/221, 33/35/76/80/126/221/222/227, 33/35/76/80/293, 33/35/94/126/141, 33/35/126/198/293, 33/35/126/222/227, 33/35/126/293, 33/35/221/222, 33/76/79, 33/76/79/126, 33/79/126/221/227/293, 34, 34/46, 34/46/48, 34/46/63, 34/46/63/164, 34/46/79/96/126, 34/46/79/164, 34/46/164, 34/63/126/129/193, 34/79/126/128/130, 34/164, 35, 35/74/77/197/225, 35/74/218, 35/76, 35/76/79/80/126, 35/76/80/126, 35/85, 35/85/141/218, 35/85/218/225, 35/85/218/274, 35/94/120/126/293, 35/145/286, 35/197/274, 35/218/308, 35/274, 46, 46/63, 46/79, 46/79/126/193, 46/96/164, 46/128/129/164, 46/129, 46/164, 46/164/193, 46/193, 59, 59/120, 63, 63/164, 63/193, 74/85/145, 74/141, 76/79/80/120, 77/85/145, 77/218, 79/96/126/129, 79/126/164, 80/126/221/227, 94/95/120/291, 94/126/293, 94/293, 120, 120/164/282/321, 126/128/129/193, 126/129/164, 128/129/130, 141/195/197/218, 164, 164/221/308, 218, 225, 263, 274, and 308, and wherein the amino acid positions of said polypeptide sequence are numbered with reference to SEQ ID NO: 44.

6. (canceled)

7. The engineered pantothenate kinase of claim 1, wherein said engineered pantothenate kinase comprises a polypeptide sequence having at least 85%, 86%, 87%, 88%, 89%, 90%, 91%, 92%, 93%, 94%, 95%, 96%, 97%, 98%, 99%, or more sequence identity to SEQ ID NO: 320, or a functional fragment thereof, and wherein said engineered pantothenate kinase comprises at least one substitution or substitution set at one or more positions selected from 20/31/35/48/63/74/94/120/164, 20/31/35/74/79/164/218/225/282, 20/35/120/197, 20/48/63/94/120/145/197/218/227, 20/48/218/227, 20/120/145/197/227, 20/197/225/227, 24, 33, 46, 48, 48/63, 48/63/74/79/120/129/227/282, 48/63/94/275, 48/63/145, 63, 63/120/197/218/275, 63/129/145, 63/218/275/282, 74/79/94/275, 94/120, 95, 130, 149, 164, 178, 196, 201, 221, 271, 277, 282, 289, 293, 298, 314, and 321, and wherein the amino acid positions of said polypeptide sequence are numbered with reference to SEQ ID NO: 320.

8. (canceled)

9. The engineered pantothenate kinase of claim 1, wherein said engineered pantothenate kinase comprises a polypeptide sequence having at least 85%, 86%, 87%, 88%, 89%, 90%, 91%, 92%, 93%, 94%, 95%, 96%, 97%, 98%, 99%, or more sequence identity to SEQ ID NO: 526, or a functional fragment thereof, and wherein said engineered pantothenate kinase comprises at least one substitution or substitution set at one or more positions selected from 24, 24/33, 24/46/221, 24/95/164/178/201/282, 24/149/178/282/293/298, 24/149/201/282, 24/149/282/314, 24/178/201/271/282/293/298/314, 24/201/271/282/293/298, 24/201/282, 24/227, 33/95/104, 46/95/282, 48, 95/201/282/293/314, 164/201/271/314, 178/293/298, 201, 201/282, 221/289, 282/293/298/314/321, and 298, and wherein the amino acid positions of said polypeptide sequence are numbered with reference to SEQ ID NO: 526.

10.-18. (canceled)

19. The engineered pantothenate kinase of claim 1, wherein said engineered pantothenate kinase comprises a polypeptide sequence that is at least 85%, 86%, 87%, 88%, 89%, 90%, 91%, 92%, 93%, 94%, 95%, 96%, 97%, 98%, 99% or more identical to the sequence of at least one engineered pantothenate kinase variant set forth in the even numbered sequences of SEQ ID NOS: 4-630.

20. The engineered pantothenate kinase of claim 1, wherein said engineered pantothenate kinase comprises a polypeptide sequence forth in the even numbered sequences of SEQ ID NOS: 4-630.

21. The engineered pantothenate kinase of claim 1, wherein said engineered pantothenate kinase comprises at least one improved property compared to wild-type E. coli pantothenate kinase.

22. The engineered pantothenate kinase of claim 21, wherein said improved property comprises improved activity on a substrate, as compared to a wild-type pantothenate kinase.

23. (canceled)

24. The engineered pantothenate kinase of claim 21, wherein said improved property comprises improved production of phospho-ethynyl glycerol, as compared to a wild-type pantothenate kinase.

25. The engineered pantothenate kinase of claim 1, wherein said engineered pantothenate kinase is purified.

26. A composition comprising at least one engineered pantothenate kinase of claim 1.

27. A polynucleotide sequence encoding at least one engineered pantothenate kinase of claim 1.

28. A polynucleotide sequence encoding at least one engineered pantothenate kinase, wherein said polynucleotide sequence comprises at least 85%, 86%, 87%, 88%, 89%, 90%, 91%, 92%, 93%, 94%, 95%, 96%, 97%, 98%, 99%, or more sequence identity to SEQ ID NO: 3, SEQ ID NO: 43, SEQ ID NO: 319, and/or SEQ ID NO: 525, wherein the polynucleotide sequence of said engineered pantothenate kinase comprises at least one substitution at one or more positions.

29.-32. (canceled)

33. The polynucleotide sequence of claim 27, wherein said polynucleotide sequence is operably linked to a control sequence.

34. The polynucleotide sequence of claim 27, wherein said polynucleotide sequence is codon optimized.

35. The polynucleotide sequence of claim 1, wherein said polynucleotide comprises an odd-numbered sequence of SEQ ID NOS: 3-629.

36. An expression vector comprising at least one polynucleotide sequence of claim 27.

37. A host cell comprising at least one expression vector of claim 36.

38. A host cell comprising at least one polynucleotide sequence of claim 27.

39. A method of producing an engineered pantothenate kinase in a host cell, comprising culturing the host cell of claim 37, under suitable conditions, such that at least one engineered pantothenate kinase is produced.

40. The method of claim 39, further comprising recovering at least one engineered pantothenate kinase from the culture and/or host cell.

41. The method of claim 39, further comprising the step of purifying said at least one engineered pantothenate kinase.

The application's sequence listing, which the Patent Office published only in electronic form, follows.

SEQUENCE LISTING (634 sequences)

SEQ ID NO: 1 - DNA, 951 bp, Artificial Sequence
  Wild Type Pantothenate Kinase from Escherichia coli
atgagcatcaaagagcagaccctgatgaccccgtacctgcagttcgaccgtaaccaatgggcggcgctgcgtgatagcgttccgatgaccctgagcgaggacgaaatcgcgcgtctgaagggtattaacgaggatctgagcctggaggaagtggcggaaatctacctgccgctgagccgtctgctgaacttctatattagcagcaacctgcgtcgtcaggcggttctggaacaatttctgggtaccaacggccagcgtatcccgtatatcattagcattgcgggtagcgtggcggttggcaaaagcaccaccgcgcgtgtgctgcaggcgctgctgagccgttggccggagcaccgtcgtgttgaactgatcaccaccgacggcttcctgcacccgaaccaagtgctgaaggagcgtggtctgatgaagaaaaagggcttcccggaaagctacgatatgcaccgtctggtgaaatttgttagcgacctgaagagcggtgtgccgaacgttaccgcgccggtgtacagccacctgatctatgatgttattccggacggcgataaaaccgtggttcagccggacatcctgattctggagggtctgaacgtgctgcaaagcggcatggactatccgcacgatccgcaccacgtgtttgttagcgacttcgtggattttagcatctacgttgacgcgccggaggatctgctgcagacctggtatattaaccgtttcctgaaatttcgtgagggtgcgttcaccgacccggatagctactttcacaactatgcgaaactgaccaaggaagaggcgatcaaaaccgcgatgaccctgtggaaggagatcaactggctgaacctgaagcaaaacattctgccgacccgtgaacgtgcgagcctgattctgaccaaaagcgcgaaccacgcggtggaggaagttcgtctgcgtaagtaa

SEQ ID NO: 2 - protein, 316 aa, Artificial Sequence
  Wild Type Pantothenate Kinase from Escherichia coli
MSIKEQTLMTPYLQFDRNQWAALRDSVPMTLSEDEIARLKGINEDLSLEEVAEIYLPLSRLLNFYISSNLRRQAVLEQFLGTNGQRIPYIISIAGSVAVGKSTTARVLQALLSRWPEHRRVELITTDGFLHPNQVLKERGLMKKKGFPESYDMHRLVKFVSDLKSGVPNVTAPVYSHLIYDVIPDGDKTVVQPDILILEGLNVLQSGMDYPHDPHHVFVSDFVDFSIYVDAPEDLLQTWYINRFLKFREGAFTDPDSYFHNYAKLTKEEAIKTAMTLWKEINWLNLKQNILPTRERASLILTKSANHAVEEVRLRK

SEQ ID NO: 3 - DNA, 978 bp, Artificial Sequence
  Engineered variant of Pantothenate Kinase from Escherichia coli
atgcaccatcatcatcatcatggcggtagcggcagcatcaaagagcagaccgagatgaccccgtacctgcaactggaccgtaaccaatgggcggcggtgcgtgatagtaacccgatgaccctgagcgaggacgaaatcgcgcgtctgaagggtattaacgaagatctgagcctggaggaagtggcggaagtctacctgccgctgagccgtgttctgaacttctatattagcagcaacctgcgtcgtcaggcgcagctggaacagtttctgggtaccaatggccagcgtatcccgtatatcattagcattgcgggtagcgtggcggttggcaaaagcacctttgcgcgtgtgctgcaggcgctgctgagccgttggccggagcatcgtcgtgttgaacatatcaccaccgacggcttcctgcacccgaaccaagtgctgaaggagcgtggtctgatggggaaaaagggtttcccggaaagctacgatatgcaccgtctgatgaaatttgttaaagacctgaagagcggtgtgccgaacgttaccgcgccggtgtacagccacctgatctatgatgttattccggacggcgataaaaccgtggttcagccggacatcctgattctggagggtctgaacgtgctgcaaagcggcatggactatccgcacgatccgcaccacgtgtttgttagcgacttcgtggattttagcatctacgttgacgcgccggaggatctgctgcagacctggtacattaaccgtttcctgaaactgcgtgagggtgcgttcaccgacccggatagctactttcacgggtatgcgaaactgaccaaggaagaggcgatcaaaaccgcgatgaccatttggaaggagatgaacagcgtgaacctgaagcaaaacattctgccgacccgtgaacgtgcgagcctgattctgaccaaaagtgcaaaccacatcgtggaggaagttcgtctgcgtaag

SEQ ID NO: 4 - protein, 326 aa, Artificial Sequence
  Engineered variant of Pantothenate Kinase from Escherichia coli
MHHHHHHGGSGSIKEQTEMTPYLQLDRNQWAAVRDSNPMTLSEDEIARLKGINEDLSLEEVAEVYLPLSRVLNFYISSNLRRQAQLEQFLGTNGQRIPYIISIAGSVAVGKSTFARVLQALLSRWPEHRRVEHITTDGFLHPNQVLKERGLMGKKGFPESYDMHRLMKFVKDLKSGVPNVTAPVYSHLIYDVIPDGDKTVVQPDILILEGLNVLQSGMDYPHDPHHVFVSDFVDFSIYVDAPEDLLQTWYINRFLKLREGAFTDPDSYFHGYAKLTKEEAIKTAMTIWKEMNSVNLKQNILPTRERASLILTKSANHIVEEVRLRK

SEQ ID NO: 5 - DNA, 978 bp, Artificial Sequence
  Engineered variant of Pantothenate Kinase from Escherichia coli
atgcaccatcatcatcatcatggcggtagcggcagcatcaaagagcagaccgagatgaccccgtacctgcaactggaccgtaaccaatgggcggcggtgcgtgatagtaacccgatgaccctgagcgaggacgaaatcgcgcgtctgaagggtattaacgaagatctgagcctggaggaagtggcggaagtctacctgccgctgagccgtgttctgaacttctatattagcagcaacctgcgtcgtcaggcgcagctggaacagtttctgggtaccaatggccagcgtatcccgtatatcattagcattgcgggtagcgtggcggttggcaaaagcacctttgcgcgtgtgctgcaggcgctgctgagccgttggccggagcatcgtcgtgttgaacatatcaccaccgacggcttcctgcacccgaaccaagtgctgaaggagcgtggtctgatggggcataagggtttcccggaaagctacgatatgcaccgtctgatgaaatttgttaaagacctgaagagcggtgtgccgaacgttaccgcgccggtgtacagccacctgatctatgatgttattccggacggcgataaaaccgtggttcagccggacatcctgattctggagggtctgaacgtgctgcaaagcggcatggactatccgcacgatccgcaccacgtgtttgttagcgacttcgtggattttagcatctacgttgacgcgccggaggatctgctgcagacctggtacattaaccgtttcctgaaactgcgtgagggtgcgttcaccgacccggatagctactttcacgggtatgcgaaactgaccaaggaagaggcgatcaaaaccgcgatgaccatttggaaggagatgaacagcgtgaacctgaagcaaaacattctgccgacccgtgaacgtgcgagcctgattctgaccaaaagtgcaaaccacatcgtggaggaagttcgtctgcgtaag

SEQ ID NO: 6 - protein, 326 aa, Artificial Sequence
  Engineered variant of Pantothenate Kinase from Escherichia coli
MHHHHHHGGSGSIKEQTEMTPYLQLDRNQWAAVRDSNPMTLSEDEIARLKGINEDLSLEEVAEVYLPLSRVLNFYISSNLRRQAQLEQFLGTNGQRIPYIISIAGSVAVGKSTFARVLQALLSRWPEHRRVEHITTDGFLHPNQVLKERGLMGHKGFPESYDMHRLMKFVKDLKSGVPNVTAPVYSHLIYDVIPDGDKTVVQPDILILEGLNVLQSGMDYPHDPHHVFVSDFVDFSIYVDAPEDLLQTWYINRFLKLREGAFTDPDSYFHGYAKLTKEEAIKTAMTIWKEMNSVNLKQNILPTRERASLILTKSANHIVEEVRLRK

SEQ ID NO: 7 - DNA, 978 bp, Artificial Sequence
  Engineered variant of Pantothenate Kinase from Escherichia coli
atgcaccatcatcatcatcatggcggtagcggcagcatcaaagagcagaccgagatgaccccgtacctgcaactggaccgtaaccaatgggcggcggtgcgtgatagtaacccgatgaccctgagcgaggacgaaatcgcgcgtctgaagggtattaacgaagatctgagcctggaggaagtggcggaagtctacctgccgctgagccgtgttctgaacttctatattagcagcaacctgcgtcgtcaggcgcagctggaacagtttctgggtaccaatggccagcgtatcccgtatatcattagcattgcgggtagcgtggcggttggcaaaagcacctttgcgcgtgtgctgcaggcgctgctgagccgttggccggagcatcgtcgtgttgaacatatcaccaccgacggcttcctgttgccgaaccaagtgctgaaggagcgtggtctgatggggaaaaagggtttcccggaaagctacgatatgcaccgtctgatgaaatttgttaaagacctgaagagcggtgtgccgaacgttaccgcgccggtgtacagccacctgatctatgatgttattccggacggcgataaaaccgtggttcagccggacatcctgattctggagggtctgaacgtgctgcaaagcggcatggactatccgcacgatccgcaccacgtgtttgttagcgacttcgtggattttagcatctacgttgacgcgccggaggatctgctgcagacctggtacattaaccgtttcctgaaactgcgtgagggtgcgttcaccgacccggatagctactttcacgggtatgcgaaactgaccaaggaagaggcgatcaaaaccgcgatgaccatttggaaggagatgaacagcgtgaacctgaagcaaaacattctgccgacccgtgaacgtgcgagcctgattctgaccaaaagtgcaaaccacatcgtggaggaagttcgtctgcgtaag

SEQ ID NO: 8 - protein, 326 aa, Artificial Sequence
  Engineered variant of Pantothenate Kinase from Escherichia coli
MHHHHHHGGSGSIKEQTEMTPYLQLDRNQWAAVRDSNPMTLSEDEIARLKGINEDLSLEEVAEVYLPLSRVLNFYISSNLRRQAQLEQFLGTNGQRIPYIISIAGSVAVGKSTFARVLQALLSRWPEHRRVEHITTDGFLLPNQVLKERGLMGKKGFPESYDMHRLMKFVKDLKSGVPNVTAPVYSHLIYDVIPDGDKTVVQPDILILEGLNVLQSGMDYPHDPHHVFVSDFVDFSIYVDAPEDLLQTWYINRFLKLREGAFTDPDSYFHGYAKLTKEEAIKTAMTIWKEMNSVNLKQNILPTRERASLILTKSANHIVEEVRLRK

SEQ ID NO: 9 - DNA, 978 bp, Artificial Sequence
  Engineered variant of Pantothenate Kinase from Escherichia coli
atgcaccatcatcatcatcatggcggtagcggcagcatcaaagagcagaccgagatgaccccgtacctgcaactggaccgtaaccaatgggcggcggtgcgtgatagtaacccgatgaccctgagcgaggacgaaatcgcgcgtctgaagggtattaacgaagatctgagcctggaggaagtggcggaagtctacctgccgctgagccgtgttctgaacttctatattagcagcaacctgcgtcgtcaggcgcagctggaacagtttctgggtaccaatggccagcgtatcccgtatatcattagcattgcgggtagcgtggcggttggcaaaagcacctttgcgcgtgtgctgcaggcgctgctgagccgttggccggagcatcgtcgtgttgaacatatcaccaccgacggcttcctgcacccgaaccaagtgctgaaggagcgtggtctgatggggaaaaagggtttcccggaaagctacgatatgcaccgtctgatgaaatttgttaaagacctgaagagcggtgtgccgaacgttaccgcgccggtgtacagccacctgatctatgatgttattccggacggcgataaaaccgtggttcagccggacatcctgattctggagggtctgaacgtgctgcaaagcggcatggactatccgcacgatccgcaccacgtgtttgttagcgacttcgtggattttagcatctacgttgacgcgccggaggatctgctgcagacctggtacattaaccgtttcctgaaactgcgtgagggtgcgttcaccgacccggatagctactttcacgggtatgcgaaactgaccaaggaagaggcgatcaaaaccgcgatgaccctttggaaggagatgaacagcgtgaacctgaagcaaaacattctgccgacccgtgaacgtgcgagcctgattctgaccaaaagtgcaaaccacatcgtggaggaagttcgtctgcgtaag

SEQ ID NO: 10 - protein, 326 aa, Artificial Sequence
  Engineered variant of Pantothenate Kinase from Escherichia coli
MHHHHHHGGSGSIKEQTEMTPYLQLDRNQWAAVRDSNPMTLSEDEIARLKGINEDLSLEEVAEVYLPLSRVLNFYISSNLRRQAQLEQFLGTNGQRIPYIISIAGSVAVGKSTFARVLQALLSRWPEHRRVEHITTDGFLHPNQVLKERGLMGKKGFPESYDMHRLMKFVKDLKSGVPNVTAPVYSHLIYDVIPDGDKTVVQPDILILEGLNVLQSGMDYPHDPHHVFVSDFVDFSIYVDAPEDLLQTWYINRFLKLREGAFTDPDSYFHGYAKLTKEEAIKTAMTLWKEMNSVNLKQNILPTRERASLILTKSANHIVEEVRLRK

SEQ ID NO: 11 - DNA, 978 bp, Artificial Sequence
  Engineered variant of Pantothenate Kinase from Escherichia coli
atgcaccatcatcatcatcatggcggtagcggcagcatcaaagagcagaccgagatgaccccgtacctgcaactggaccgtaaccaatgggcggcggtgcgtgatagtaacccgatgaccctgagcgaggacgaaatcgcgcgtctgaagggtattaacgaagatctgagcctggaggaagtggcggaagtctacctgccgctgagccgtgttctgaacttctatattagcagcaacctgcgtcgtcaggcgcagctggaacagtttctgggtaccaatggccagcgtatcccgtatatcattagcattgcgggtagcgtggcggttggcaaaagcacctttgcgcgtgtgctgcaggcgctgctgagccgttggccggagcatcgtcgtgttgaacatatcaccaccgacggcttcctgcacccgaaccaagtgctgaaggagcgtggtctgatggggaaaaagggtttcccggaaagctacgatatgcaccgtctgatgaaatttgttaaagacctgaagagcggtgtgccgaacgttaccgcgccggtgtacagccacctgatctatgatgttattccggacggcgataaaaccgtggttcagccggacatcctgattctggagggtctgaacgtgctgcaaagcggcatggactatccgcacgatccgcaccacgtgtttgttagcgacttcgtggattttagcatctacgttgacgcgccggaggatctgctgcagacctggtttattaaccgtttcctgaaactgcgtgagggtgcgttcaccgacccggatagctactttcacgggtatgcgaaactgaccaaggaagaggcgatcaaaaccgcgatgaccatttggaaggagatgaacagcgtgaacctgaagcaaaacattctgccgacccgtgaacgtgcgagcctgattctgaccaaaagtgcaaaccacatcgtggaggaagttcgtctgcgtaag

SEQ ID NO: 12 - protein, 326 aa, Artificial Sequence
  Engineered variant of Pantothenate Kinase from Escherichia coli
MHHHHHHGGSGSIKEQTEMTPYLQLDRNQWAAVRDSNPMTLSEDEIARLKGINEDLSLEEVAEVYLPLSRVLNFYISSNLRRQAQLEQFLGTNGQRIPYIISIAGSVAVGKSTFARVLQALLSRWPEHRRVEHITTDGFLHPNQVLKERGLMGKKGFPESYDMHRLMKFVKDLKSGVPNVTAPVYSHLIYDVIPDGDKTVVQPDILILEGLNVLQSGMDYPHDPHHVFVSDFVDFSIYVDAPEDLLQTWFINRFLKLREGAFTDPDSYFHGYAKLTKEEAIKTAMTIWKEMNSVNLKQNILPTRERASLILTKSANHIVEEVRLRK

SEQ ID NO: 13 - DNA, 978 bp, Artificial Sequence
  Engineered variant of Pantothenate Kinase from Escherichia coli
atgcaccatcatcatcatcatggcggtagcggcagcatcaaagagcagaccgagatgaccccgtacctgcaactggaccgtaaccaatgggcggcggtgcgtgatagtaacccgatgaccctgagcgaggacgaaatcgcgcgtctgaagggtattaacgaagatctgagcctggaggaagtggcggaagtctacctgccgctgagccgtgttctgaacttctatattagcagcaacctgcgtcgtcaggcgcagctggaacagtttctgggtaccaatggccagcgtatcccgtatatcattagcattgcgggtagcgtggcggttggcaaaagcacctttgcgcgtgtgctgcaggcgctgctgagccgttggccggagcatcgtcgtgttgaacatatcaccaccgacggcttcctgcacccgaaccaagtgctgaaggagcgtggtctgatggggaaaaagggtttcccggaaagctacgatatgcaccgtctgatgaaatttgttaaagacctgaagagcggtgtgccgaacgttaccgcgccggtgtacagccacctgatctatgatgttattccggacggcgataaaaccgtggttcagccggacatcctgattctggagggtctgaacgtgctgcaaagcggcatggactatccgcacgatccgcaccacgtgtttgttagcgacttcgtggattttagcatctacgttgacgcgccggaggatctgctgcagacctggtaccttaaccgtttcctgaaactgcgtgagggtgcgttcaccgacccggatagctactttcacgggtatgcgaaactgaccaaggaagaggcgatcaaaaccgcgatgaccatttggaaggagatgaacagcgtgaacctgaagcaaaacattctgccgacccgtgaacgtgcgagcctgattctgaccaaaagtgcaaaccacatcgtggaggaagttcgtctgcgtaag

SEQ ID NO: 14 - protein, 326 aa, Artificial Sequence
  Engineered variant of Pantothenate Kinase from Escherichia coli
MHHHHHHGGSGSIKEQTEMTPYLQLDRNQWAAVRDSNPMTLSEDEIARLKGINEDLSLEEVAEVYLPLSRVLNFYISSNLRRQAQLEQFLGTNGQRIPYIISIAGSVAVGKSTFARVLQALLSRWPEHRRVEHITTDGFLHPNQVLKERGLMGKKGFPESYDMHRLMKFVKDLKSGVPNVTAPVYSHLIYDVIPDGDKTVVQPDILILEGLNVLQSGMDYPHDPHHVFVSDFVDFSIYVDAPEDLLQTWYLNRFLKLREGAFTDPDSYFHGYAKLTKEEAIKTAMTIWKEMNSVNLKQNILPTRERASLILTKSANHIVEEVRLRK

SEQ ID NO: 15 - DNA, 978 bp, Artificial Sequence
  Engineered variant of Pantothenate Kinase from Escherichia coli
atgcaccatcatcatcatcatggcggtagcggcagcatcaaagagcagaccgagatgaccccgtacctgcaactggaccgtaaccaatgggcggcggtgcgtgatagtaacccgatgaccctgagcgaggacgaaatcgcgcgtctgaagggtattaacgaagatctgagcctggaggaagtggcggaagtctacctgccgctgagccgtgttctgaacttctatattagcagcaacctgcgtcgtcaggcgcagctggaacagtttctgggtaccaatggccagcgtatcccgtatatcattagcattgcgggtagcgtggcggttggcaaaagcacctttgcgcgtgtgctgcaggcgctgctgagccgttggccggagcatcgtcgtgttgaacatatcaccaccgacggcttcctgcacccgaaccaagtgctgaaggagcgtggtctgatggggaaaaagggtttcccggaaagctacgatatgcaccgtctgatgaaatttgttaaagacctgaagagcggtgtgccgaacgttaccgcgccggtgtacagccacctgatctatgatgttattccggacggcgataaaaccgtggttcagccggacatcctgattctggagggtctgaacgtgctgcaaagcggcatggactatccgcacgatccgcaccacgtgtttgttagcgacttcgtggattttagcatctacgttgacgcgccggaggatctgctgcagacctggtacattaaccgtttcctgaaactgcgtgagggtgcgttcaccgacccggatagctactttcacgggtatgcgaaactgaccaaggaagaggcgatcaaaaccgcgatgaccatttgggcggagatgaacagcgtgaacctgaagcaaaacattctgccgacccgtgaacgtgcgagcctgattctgaccaaaagtgcaaaccacatcgtggaggaagttcgtctgcgtaag

SEQ ID NO: 16 - protein, 326 aa, Artificial Sequence
  Engineered variant of Pantothenate Kinase from Escherichia coli
MHHHHHHGGSGSIKEQTEMTPYLQLDRNQWAAVRDSNPMTLSEDEIARLKGINEDLSLEEVAEVYLPLSRVLNFYISSNLRRQAQLEQFLGTNGQRIPYIISIAGSVAVGKSTFARVLQALLSRWPEHRRVEHITTDGFLHPNQVLKERGLMGKKGFPESYDMHRLMKFVKDLKSGVPNVTAPVYSHLIYDVIPDGDKTVVQPDILILEGLNVLQSGMDYPHDPHHVFVSDFVDFSIYVDAPEDLLQTWYINRFLKLREGAFTDPDSYFHGYAKLTKEEAIKTAMTIWAEMNSVNLKQNILPTRERASLILTKSANHIVEEVRLRK

SEQ ID NO: 17 - DNA, 978 bp, Artificial Sequence
  Engineered variant of Pantothenate Kinase from Escherichia coli
atgcaccatcatcatcatcatggcggtagcggcagcatcaaagagcagaccgagatgaccccgtacctgcaactggaccgtaaccaatgggcggcggtgcgtgatagtaacccgatgaccctgagcgaggacgaaatcgcgcgtctgaagggtattaacgaagatctgagcctggaggaagtggcggaagtctacctgccgctgagccgtgttctgaacttctatattagcagcaacctgcgtcgtcaggcgcagctggaacagtttctgggtaccaatggccagcgtatcccgtatatcattagcattgcgggtagcgtggcggttggcaaaagcacctttgcgcgtgtgctgcaggcgctgctgagccgttggccggagcatcgtcgtgttgaacatatcaccaccgacggcttcctgcacccgaaccaagtgctgaaggagcgtggtctgatggggcggaagggtttcccggaaagctacgatatgcaccgtctgatgaaatttgttaaagacctgaagagcggtgtgccgaacgttaccgcgccggtgtacagccacctgatctatgatgttattccggacggcgataaaaccgtggttcagccggacatcctgattctggagggtctgaacgtgctgcaaagcggcatggactatccgcacgatccgcaccacgtgtttgttagcgacttcgtggattttagcatctacgttgacgcgccggaggatctgctgcagacctggtacattaaccgtttcctgaaactgcgtgagggtgcgttcaccgacccggatagctactttcacgggtatgcgaaactgaccaaggaagaggcgatcaaaaccgcgatgaccatttggaaggagatgaacagcgtgaacctgaagcaaaacattctgccgacccgtgaacgtgcgagcctgattctgaccaaaagtgcaaaccacatcgtggaggaagttcgtctgcgtaag

SEQ ID NO: 18 - protein, 326 aa, Artificial Sequence
  Engineered variant of Pantothenate Kinase from Escherichia coli
MHHHHHHGGSGSIKEQTEMTPYLQLDRNQWAAVRDSNPMTLSEDEIARLKGINEDLSLEEVAEVYLPLSRVLNFYISSNLRRQAQLEQFLGTNGQRIPYIISIAGSVAVGKSTFARVLQALLSRWPEHRRVEHITTDGFLHPNQVLKERGLMGRKGFPESYDMHRLMKFVKDLKSGVPNVTAPVYSHLIYDVIPDGDKTVVQPDILILEGLNVLQSGMDYPHDPHHVFVSDFVDFSIYVDAPEDLLQTWYINRFLKLREGAFTDPDSYFHGYAKLTKEEAIKTAMTIWKEMNSVNLKQNILPTRERASLILTKSANHIVEEVRLRK

SEQ ID NO: 19 - DNA, 978 bp, Artificial Sequence
  Engineered variant of Pantothenate Kinase from Escherichia coli
atgcaccatcatcatcatcatggcggtagcggcagcatcaaagagcagaccgagatgaccccgtacctgcaactggaccgtaaccaatgggcggcggtgcgtgatagtaacccgatgaccctgagcgaggacgaaatcgcgcgtctgaagggtattaacgaagatctgagcctggaggaagtggcggaagtctacctgccgctgagccgtgttctgaacttctatattagcagcaacctgcgtcgtcaggcgcagctggaacagtttctgggtaccaatggccagcgtatcccgtatatcattagcgtggcgggtagcgtggcggttggcaaaagcacctttgcgcgtgtgctgcaggcgctgctgagccgttggccggagcatcgtcgtgttgaacatatcaccaccgacggcttcctgcacccgaaccaagtgctgaaggagcgtggtctgatggggaaaaagggtttcccggaaagctacgatatgcaccgtctgatgaaatttgttaaagacctgaagagcggtgtgccgaacgttaccgcgccggtgtacagccacctgatctatgatgttattccggacggcgataaaaccgtggttcagccggacatcctgattctggagggtctgaacgtgctgcaaagcggcatggactatccgcacgatccgcaccacgtgtttgttagcgacttcgtggattttagcatctacgttgacgcgccggaggatctgctgcagacctggtacattaaccgtttcctgaaactgcgtgagggtgcgttcaccgacccggatagctactttcacgggtatgcgaaactgaccaaggaagaggcgatcaaaaccgcgatgaccatttggaaggagatgaacagcgtgaacctgaagcaaaacattctgccgacccgtgaacgtgcgagcctgattctgaccaaaagtgcaaaccacatcgtggaggaagttcgtctgcgtaag

SEQ ID NO: 20 - protein, 326 aa, Artificial Sequence
  Engineered variant of Pantothenate Kinase from Escherichia coli
MHHHHHHGGSGSIKEQTEMTPYLQLDRNQWAAVRDSNPMTLSEDEIARLKGINEDLSLEEVAEVYLPLSRVLNFYISSNLRRQAQLEQFLGTNGQRIPYIISVAGSVAVGKSTFARVLQALLSRWPEHRRVEHITTDGFLHPNQVLKERGLMGKKGFPESYDMHRLMKFVKDLKSGVPNVTAPVYSHLIYDVIPDGDKTVVQPDILILEGLNVLQSGMDYPHDPHHVFVSDFVDFSIYVDAPEDLLQTWYINRFLKLREGAFTDPDSYFHGYAKLTKEEAIKTAMTIWKEMNSVNLKQNILPTRERASLILTKSANHIVEEVRLRK

SEQ ID NO: 21 - DNA, 978 bp, Artificial Sequence
  Engineered variant of Pantothenate Kinase from Escherichia coli
atgcaccatcatcatcatcatggcggtagcggcagcatcaaagagcagaccgagatgaccccgtacctgcaactggaccgtaaccaatgggcggcggtgcgtgatagtaacccgatgaccctgagcgaggacgaaatcgcgcgtctgaagggtattaacgaagatctgagcctggaggaagtggcggaagtctacctgccgctgagccgtgttctgaacttctatattagcagcaacctgcgtcgtcaggcgcagctggaacagtttctgggtaccaatggccagcgtatcccgtatatcattagcattgcgggtagcgtggcggttggcaaaagcacctttgcgcgtgtgctgcaggcgctgctgagccgttggccggagcatcgtcgtgttgaacatatcaccaccgacggcttcctgcacccgaaccaagtgctgaaggagcgtggtctgatggggaaaaagggtttcccggaaagctacgatatgcaccgtctgatgaaatttgttaaagacctgaagagcggtgtgccgaacgttaccgcgccggtgtacagccacctgatctatgatgttattccggacggcgataaaaccgtggttcagccggacatcctgattctggagggtctgaacgtgctgcaaagcggcatggactatccgcacgatccgcaccacgtgtttgttagcgacttcgtggattttagcatctacgttgacgcgccggaggatctgctgcagacctggtacattaaccgtttcctgaaactgcgtgagggtgcgttcaccgacccggatagctactttcacgggtatgcgaaactgaccaaggaagaggcgatcaaaaccgcgatgaccatttggaaggagatgaacagcgtgaacctggtgcaaaacattctgccgacccgtgaacgtgcgagcctgattctgaccaaaagtgcaaaccacatcgtggaggaagttcgtctgcgtaag

SEQ ID NO: 22 - protein, 326 aa, Artificial Sequence
  Engineered variant of Pantothenate Kinase from Escherichia coli
MHHHHHHGGSGSIKEQTEMTPYLQLDRNQWAAVRDSNPMTLSEDEIARLKGINEDLSLEEVAEVYLPLSRVLNFYISSNLRRQAQLEQFLGTNGQRIPYIISIAGSVAVGKSTFARVLQALLSRWPEHRRVEHITTDGFLHPNQVLKERGLMGKKGFPESYDMHRLMKFVKDLKSGVPNVTAPVYSHLIYDVIPDGDKTVVQPDILILEGLNVLQSGMDYPHDPHHVFVSDFVDFSIYVDAPEDLLQTWYINRFLKLREGAFTDPDSYFHGYAKLTKEEAIKTAMTIWKEMNSVNLVQNILPTRERASLILTKSANHIVEEVRLRK

SEQ ID NO: 23 - DNA, 978 bp, Artificial Sequence
  Engineered variant of Pantothenate Kinase from Escherichia coli
atgcaccatcatcatcatcatggcggtagcggcagcatcaaagagcagaccgagatgaccccgtacctgcaactggaccgtaaccaatgggcggcggtgcgtgatagtaacccgatgaccctgagcgaggacgaaatcgcgcgtctgaagggtattaacgaagatctgagcctggaggaagtggcggaagtctacctgccgctgagccgtgttctgaacttctatattagcagcaacctgcgtcgtcaggcgcagctggaacagtttctgggtaccaatggccagcgtatcccgtatatcattagcattgcgggtagcgtggcggttggcaaaagcacctttgcgcgtgtgctgcaggcgctgctgagccgttggccggagcatcgtcgtgttgaacatatcaccaccgacggcttcctgcacccgaaccaagtgctgaaggagcgtggtctgatggggaaaaagggtttcccggaaagctacgatatgcaccgtctgatgaaatttgttaaagacctgaagagcggtgtgccgaacgttaccgcgccggtgtacagccacctgatctatgatgttattccggacggcgataaaaccgtggttcagccggacatcctgattctggagggtctgaacgtgctgcaaagcggcatggactatccgcacgatccgcaccacgtgtttgttagcgacttcgtggattttagcatctacgttgacgcgccggaggatctgctgcagacctggtacattaaccgtttcctgaaactgcgtgagggtgcgttcaccgacccggatagctactttcacgggtatgcgaaactgaccaaggaagaggcgatcaaaaccgcgatgaccatttggaagggtatgaacagcgtgaacctgaagcaaaacattctgccgacccgtgaacgtgcgagcctgattctgaccaaaagtgcaaaccacatcgtggaggaagttcgtctgcgtaag

SEQ ID NO: 24 - protein, 326 aa, Artificial Sequence
  Engineered variant of Pantothenate Kinase from Escherichia coli
MHHHHHHGGSGSIKEQTEMTPYLQLDRNQWAAVRDSNPMTLSEDEIARLKGINEDLSLEEVAEVYLPLSRVLNFYISSNLRRQAQLEQFLGTNGQRIPYIISIAGSVAVGKSTFARVLQALLSRWPEHRRVEHITTDGFLHPNQVLKERGLMGKKGFPESYDMHRLMKFVKDLKSGVPNVTAPVYSHLIYDVIPDGDKTVVQPDILILEGLNVLQSGMDYPHDPHHVFVSDFVDFSIYVDAPEDLLQTWYINRFLKLREGAFTDPDSYFHGYAKLTKEEAIKTAMTIWKGMNSVNLKQNILPTRERASLILTKSANHIVEEVRLRK

SEQ ID NO: 25 - DNA, 978 bp, Artificial Sequence
  Engineered variant of Pantothenate Kinase from Escherichia coli
atgcaccatcatcatcatcatggcggtagcggcagcatcaaagagcagaccgagatgaccccgtacctgcaactggaccgtaaccaatgggcggcggtgcgtgatagtaacccgatgaccctgagcgaggacgaaatcgcgcgtctgaagggtattaacgaagatctgagcctggaggaagtggcggaagtctacctgccgctgagccgtgttctgaacttctatattagcagcaacctgcgtcgtcaggcgcagctggaacagtttctgggtaccaatggccagcgtatcccgtatatcattagcattgcgggtagcgtggcggttggcaaaagcacctttgcgcgtgtgctgcaggcgctgctgagccgttggccggagcatcgtcgtgttgaacatatcagtaccgacggcttcctgcacccgaaccaagtgctgaaggagcgtggtctgatggggaaaaagggtttcccggaaagctacgatatgcaccgtctgatgaaatttgttaaagacctgaagagcggtgtgccgaacgttaccgcgccggtgtacagccacctgatctatgatgttattccggacggcgataaaaccgtggttcagccggacatcctgattctggagggtctgaacgtgctgcaaagcggcatggactatccgcacgatccgcaccacgtgtttgttagcgacttcgtggattttagcatctacgttgacgcgccggaggatctgctgcagacctggtacattaaccgtttcctgaaactgcgtgagggtgcgttcaccgacccggatagctactttcacgggtatgcgaaactgaccaaggaagaggcgatcaaaaccgcgatgaccatttggaaggagatgaacagcgtgaacctgaagcaaaacattctgccgacccgtgaacgtgcgagcctgattctgaccaaaagtgcaaaccacatcgtggaggaagttcgtctgcgtaag

SEQ ID NO: 26 - protein, 326 aa, Artificial Sequence
  Engineered variant of Pantothenate Kinase from Escherichia coli
MHHHHHHGGSGSIKEQTEMTPYLQLDRNQWAAVRDSNPMTLSEDEIARLKGINEDLSLEEVAEVYLPLSRVLNFYISSNLRRQAQLEQFLGTNGQRIPYIISIAGSVAVGKSTFARVLQALLSRWPEHRRVEHISTDGFLHPNQVLKERGLMGKKGFPESYDMHRLMKFVKDLKSGVPNVTAPVYSHLIYDVIPDGDKTVVQPDILILEGLNVLQSGMDYPHDPHHVFVSDFVDFSIYVDAPEDLLQTWYINRFLKLREGAFTDPDSYFHGYAKLTKEEAIKTAMTIWKEMNSVNLKQNILPTRERASLILTKSANHIVEEVRLRK

SEQ ID NO: 27 - DNA, 978 bp, Artificial Sequence
  Engineered variant of Pantothenate Kinase from Escherichia coli
atgcaccatcatcatcatcatggcggtagcggcagcatcaaagagcagaccgagatgaccccgtacctgcaactggaccgtaaccaatgggcggcggtgcgtgatagtaacccgatgaccctgagcgaggacgaaatcgcgcgtctgaagggtattaacgaagatctgagcctggaggaagtggcggaagtctacctgccgctgagccgtgttctgaacttctatattagcagcaacctgcgtcgtcaggcgcagctggaacagtttctgggtaccaatggccagcgtatcccgtatatcattagcattgcgggtagcgtggcggttggcaaaagcacctttgcgcgtgtgctgcaggcgctgctgagccgttggccggagcatcgtcgtgttgaacatatcaccaccgacggcttcctgcacccgaaccaagtgctgaaggagcgtggtctgatggggaaaaagggtttcccggaaagctacgatatgcaccgtctgatgaaatttgttaaagacctgaagagcggtgtgccgaacgttaccgcgccggtgtacagccacctgatctatgatgttgtgccggacggcgataaaaccgtggttcagccggacatcctgattctggagggtctgaacgtgctgcaaagcggcatggactatccgcacgatccgcaccacgtgtttgttagcgacttcgtggattttagcatctacgttgacgcgccggaggatctgctgcagacctggtacattaaccgtttcctgaaactgcgtgagggtgcgttcaccgacccggatagctactttcacgggtatgcgaaactgaccaaggaagaggcgatcaaaaccgcgatgaccatttggaaggagatgaacagcgtgaacctgaagcaaaacattctgccgacccgtgaacgtgcgagcctgattctgaccaaaagtgcaaaccacatcgtggaggaagttcgtctgcgtaag

SEQ ID NO: 28 - protein, 326 aa, Artificial Sequence
  Engineered variant of Pantothenate Kinase from Escherichia coli
MHHHHHHGGSGSIKEQTEMTPYLQLDRNQWAAVRDSNPMTLSEDEIARLKGINEDLSLEEVAEVYLPLSRVLNFYISSNLRRQAQLEQFLGTNGQRIPYIISIAGSVAVGKSTFARVLQALLSRWPEHRRVEHITTDGFLHPNQVLKERGLMGKKGFPESYDMHRLMKFVKDLKSGVPNVTAPVYSHLIYDVVPDGDKTVVQPDILILEGLNVLQSGMDYPHDPHHVFVSDFVDFSIYVDAPEDLLQTWYINRFLKLREGAFTDPDSYFHGYAKLTKEEAIKTAMTIWKEMNSVNLKQNILPTRERASLILTKSANHIVEEVRLRK

SEQ ID NO: 29 - DNA, 978 bp, Artificial Sequence
  Engineered variant of Pantothenate Kinase from Escherichia coli
atgcaccatcatcatcatcatggcggtagcggcagcatcaaagagcagaccgagatgaccccgtacctgcaactggaccgtaaccaatgggcggcggtgcgtgatagtaacccgatgaccctgagcgaggacgaaatcgcgcgtctgaagggtattaacgaagatctgagcctggaggaagtggcggaagtctacctgccgctgagccgtgttctgaacttctatattagcagcaacctgcgtcgtcaggcgcagctggaacagtttctgggtaccaatggccagcgtatcccgtatatcattagcattgcgggtagcgtggcggttggcaaaagcacctttgcgcgtgtgctgcaggcgctgctgagccgttggccggagcatcgtcgtgttgaacatatcaccaccgacggcttcctgcacccgaaccaagtgctgaaggagcgtggtctgatggggaaaaagggtttcccggaaagctacgatatgcaccgtctgatgaaatttgttaaagacctgaagagcggtgtgccgaacgttaccgcgccggtgtacagccacctgatctatgatgttattccggacggcgataaaaccgtggttcagccggacatcctgattctggagggtctgaacgtgctgcaaagcggcatggactatccgcacgatccgcaccacgtgtttgttagcgacttcgtggattttagcatctacgttgacgcgccggaggatctgctgactacctggtacattaaccgtttcctgaaactgcgtgagggtgcgttcaccgacccggatagctactttcacgggtatgcgaaactgaccaaggaagaggcgatcaaaaccgcgatgaccatttggaaggagatgaacagcgtgaacctgaagcaaaacattctgccgacccgtgaacgtgcgagcctgattctgaccaaaagtgcaaaccacatcgtggaggaagttcgtctgcgtaag

SEQ ID NO: 30 - protein, 326 aa, Artificial Sequence
  Engineered variant of Pantothenate Kinase from Escherichia coli
MHHHHHHGGSGSIKEQTEMTPYLQLDRNQWAAVRDSNPMTLSEDEIARLKGINEDLSLEEVAEVYLPLSRVLNFYISSNLRRQAQLEQFLGTNGQRIPYIISIAGSVAVGKSTFARVLQALLSRWPEHRRVEHITTDGFLHPNQVLKERGLMGKKGFPESYDMHRLMKFVKDLKSGVPNVTAPVYSHLIYDVIPDGDKTVVQPDILILEGLNVLQSGMDYPHDPHHVFVSDFVDFSIYVDAPEDLLTTWYINRFLKLREGAFTDPDSYFHGYAKLTKEEAIKTAMTIWKEMNSVNLKQNILPTRERASLILTKSANHIVEEVRLRK

SEQ ID NO: 31 - DNA, 978 bp, Artificial Sequence
  Engineered variant of Pantothenate Kinase from Escherichia coli
atgcaccatcatcatcatcatggcggtagcggcagcatcaaagagcagaccgagatgaccccgtacctgcaactggaccgtaaccaatgggcggcggtgcgtgatagtaacccgatgaccctgagcgaggacgaaatcgcgcgtctgaagggtattaacgaagatctgagcctggaggaagtggcggaagtctacctgccgctgagccgtgttctgaacttctatattagcagcaacctgcgtcgtcaggcgcagctggaacagtttctgggtaccaatggccagcgtatcccgtatatcattagcattgcgggtagcgtggcggttggcaaaagcacctttgcgcgtgtgctgcaggcgctgctgagccgttggccggagcatcgtcgtgttgaacatatcaccaccgacggcttcctgcacccgaaccaagtgctgaaggagcgtggtctgatggggaaaaagggtttcccggaaagctacgatatgcaccgtctgatgaaatttgttaaagacctgaagagcggtgtgccgaacgttaccgcgccggtgtacagccacctgatctatgatgttattccggacggcgataaaaccgtggttcagccggacatcctgattctggagggtctgaacgtgctgcaaggtggcatggactatccgcacgatccgcaccacgtgtttgttagcgacttcgtggattttagcatctacgttgacgcgccggaggatctgctgcagacctggtacattaaccgtttcctgaaactgcgtgagggtgcgttcaccgacccggatagctactttcacgggtatgcgaaactgaccaaggaagaggcgatcaaaaccgcgatgaccatttggaaggagatgaacagcgtgaacctgaagcaaaacattctgccgacccgtgaacgtgcgagcctgattctgaccaaaagtgcaaaccacatcgtggaggaagttcgtctgcgtaag

SEQ ID NO: 32 - protein, 326 aa, Artificial Sequence
  Engineered variant of Pantothenate Kinase from Escherichia coli
MHHHHHHGGSGSIKEQTEMTPYLQLDRNQWAAVRDSNPMTLSEDEIARLKGINEDLSLEEVAEVYLPLSRVLNFYISSNLRRQAQLEQFLGTNGQRIPYIISIAGSVAVGKSTFARVLQALLSRWPEHRRVEHITTDGFLHPNQVLKERGLMGKKGFPESYDMHRLMKFVKDLKSGVPNVTAPVYSHLIYDVIPDGDKTVVQPDILILEGLNVLQGGMDYPHDPHHVFVSDFVDFSIYVDAPEDLLQTWYINRFLKLREGAFTDPDSYFHGYAKLTKEEAIKTAMTIWKEMNSVNLKQNILPTRERASLILTKSANHIVEEVRLRK

SEQ ID NO: 33 - DNA, 978 bp, Artificial Sequence
  Engineered variant of Pantothenate Kinase from Escherichia coli
atgcaccatcatcatcatcatggcggtagcggcagcatcaaagagcagaccgagatgaccccgtacctgcaactggaccgtaaccaatgggcggcggtgcgtgatagtaacccgatgaccctgagcgaggacgaaatcgcgcgtctgaagggtattaacgaagatctgagcctggaggaagtggcggaagtctacctgccgctgagccgtgttctgaacttctatattagcagcaacctgcgtcgtcaggcgcagctggaacagtttctgggtaccaatggccagcgtatcccgtatatcattagcattgcgggtagcgtggcggttggcaaaagcacctttgcgcgtgtgctgcaggcgctgctgagccgttggccggagcatcgtcgtgttgaacatatcaccaccgacggcttcctgcacccgaaccaagtgctgaaggagcgtggtctgatggggaaaaagggtttcccggaaagctacgatatgcaccgtctgatgaaatttgttaaagacctgaagagcggtgtgccgaacgttaccgcgccggtgtacagccacctgatctatgatgttattccggacggcgataaaaccgtggttcagccggacatcctgattctggagggtctgaacgtgctgcaaagcggcatggactatccgcacgatccgcaccacgtgtttgttagcgacttcgtggattttagcatctttgttgacgcgccggaggatctgctgcagacctggtacattaaccgtttcctgaaactgcgtgagggtgcgttcaccgacccggatagctactttcacgggtatgcgaaactgaccaaggaagaggcgatcaaaaccgcgatgaccatttggaaggagatgaacagcgtgaacctgaagcaaaacattctgccgacccgtgaacgtgcgagcctgattctgaccaaaagtgcaaaccacatcgtggaggaagttcgtctgcgtaag

SEQ ID NO: 34 - protein, 326 aa, Artificial Sequence
  Engineered variant of Pantothenate Kinase from Escherichia coli
MHHHHHHGGSGSIKEQTEMTPYLQLDRNQWAAVRDSNPMTLSEDEIARLKGINEDLSLEEVAEVYLPLSRVLNFYISSNLRRQAQLEQFLGTNGQRIPYIISIAGSVAVGKSTFARVLQALLSRWPEHRRVEHITTDGFLHPNQVLKERGLMGKKGFPESYDMHRLMKFVKDLKSGVPNVTAPVYSHLIYDVIPDGDKTVVQPDILILEGLNVLQSGMDYPHDPHHVFVSDFVDFSIFVDAPEDLLQTWYINRFLKLREGAFTDPDSYFHGYAKLTKEEAIKTAMTIWKEMNSVNLKQNILPTRERASLILTKSANHIVEEVRLRK

SEQ ID NO: 35 - DNA, 978 bp, Artificial Sequence
  Engineered variant of Pantothenate Kinase from Escherichia coli
atgcaccatcatcatcatcatggcggtagcggcagcatcaaagagcagaccgagatgaccccgtacctgcaactggaccgtaaccaatgggcggcggtgcgtgatagtaacccgatgaccctgagcgaggacgaaatcgcgcgtctgaagggtattaacgaagatctgagcctggaggaagtggcggaagtctacctgccgctgagccgtgttctgaacttctatattagcagcaacctgcgtcgtcaggcgcagctggaacagtttctgggtaccaatggccagcgtatcccgtatatcattagcattgcgggtagcgtggcggttggcaaaagcacctttgcgcgtgtgctgcaggcgctgctgagccgttggccggagcatcgtcgtgttgaacatatcaccaccgacggcttcctgcacccgaaccaagtgctgaaggagcgtggtctgatggggaaaaagggtttcccggaaagctacgatatgcaccgtctgatgaaatttgttaaagacctgaagagcggtgtgccgaacgttaccgcgccggtgtacagccacctgatctatgatgttattccggacggcgataaaaccgtggttcagccggacatcctgattctggagggtctgaacgtgctgcaaagcggcatggactatccgcacgatccgcaccacgtgtttgttagcgacttcgtggattttagcatctacgttgacgcgccggaggatctgctgcagacctggtacattaaccgtttcctgaaactgcgtgagggtgcgttcaccgacccggatagctactttcacgggtatgcgaaactgaccaaggaagaggcgatcaaaaccgcgatgaccatttggtctgagatgaacagcgtgaacctgaagcaaaacattctgccgacccgtgaacgtgcgagcctgattctgaccaaaagtgcaaaccacatcgtggaggaagttcgtctgcgtaag

SEQ ID NO: 36 - protein, 326 aa, Artificial Sequence
  Engineered variant of Pantothenate Kinase from Escherichia coli
MHHHHHHGGSGSIKEQTEMTPYLQLDRNQWAAVRDSNPMTLSEDEIARLKGINEDLSLEEVAEVYLPLSRVLNFYISSNLRRQAQLEQFLGTNGQRIPYIISIAGSVAVGKSTFARVLQALLSRWPEHRRVEHITTDGFLHPNQVLKERGLMGKKGFPESYDMHRLMKFVKDLKSGVPNVTAPVYSHLIYDVIPDGDKTVVQPDILILEGLNVLQSGMDYPHDPHHVFVSDFVDFSIYVDAPEDLLQTWYINRFLKLREGAFTDPDSYFHGYAKLTKEEAIKTAMTIWSEMNSVNLKQNILPTRERASLILTKSANHIVEEVRLRK

SEQ ID NO: 37 - DNA, 978 bp, Artificial Sequence
  Engineered variant of Pantothenate Kinase from Escherichia coli
atgcaccatcatcatcatcatggcggtagcggcagcatcaaagagcagaccgagatgaccccgtacctgcaactggaccgtaaccaatgggcggcggtgcgtgatagtaacccgatgaccctgagcgaggacgaaatcgcgcgtctgaagggtattaacgaagatctgagcctggaggaagtggcggaagtctacctgccgctgagccgtgttctgaacttctatattagcagcaacctgcgtcgtcaggcgcagctggaacagtttctgggtaccaatggccagcgtatcccgtatatcattagcattgcgggtagcgtggcggttggcaaaagcacctttgcgcgtgtgctgcaggcgctgctgagccgttggccggagcatcgtcgtgttgaacatatcaccaccgacggcttcctgcacccgaaccaagtgctgaaggagcgtggtctgatggggaaaaagggtttcccggaaagctacgatatgcaccgtctgatgaaatttgttaaagacctgaagagcggtgtgccgaacgttaccgcgccggtgtacagccacctgatctatgatgttattccggacggcgataaaaccgtggttcagccggacatcctgattctggagggtctgaacgtgctgcaaagcggcatggactatccgcacgatccgcaccacgtgtttgttagcgacttcgtggattttagcatctacgttgacgcgccggaggatctgctgcagtcttggtacattaaccgtttcctgaaactgcgtgagggtgcgttcaccgacccggatagctactttcacgggtatgcgaaactgaccaaggaagaggcgatcaaaaccgcgatgaccatttggaaggagatgaacagcgtgaacctgaagcaaaacattctgccgacccgtgaacgtgcgagcctgattctgaccaaaagtgcaaaccacatcgtggaggaagttcgtctgcgtaag

SEQ ID NO: 38 - protein, 326 aa, Artificial Sequence
  Engineered variant of Pantothenate Kinase from Escherichia coli
MHHHHHHGGSGSIKEQTEMTPYLQLDRNQWAAVRDSNPMTLSEDEIARLKGINEDLSLEEVAEVYLPLSRVLNFYISSNLRRQAQLEQFLGTNGQRIPYIISIAGSVAVGKSTFARVLQALLSRWPEHRRVEHITTDGFLHPNQVLKERGLMGKKGFPESYDMHRLMKFVKDLKSGVPNVTAPVYSHLIYDVIPDGDKTVVQPDILILEGLNVLQSGMDYPHDPHHVFVSDFVDFSIYVDAPEDLLQSWYINRFLKLREGAFTDPDSYFHGYAKLTKEEAIKTAMTIWKEMNSVNLKQNILPTRERASLILTKSANHIVEEVRLRK

SEQ ID NO: 39 - DNA, 978 bp, Artificial Sequence
  Engineered variant of Pantothenate Kinase from Escherichia coli
atgcaccatcatcatcatcatggcggtagcggcagcatcaaagagcagaccgagatgaccccgtacctgcaactggaccgtaaccaatgggcggcggtgcgtgatagtaacccgatgaccctgagcgaggacgaaatcgcgcgtctgaagggtattaacgaagatctgagcctggaggaagtggcggaagtctacctgccgctgagccgtgttctgaacttctatattagcagcaacctgcgtcgtcaggcgcagctggaacagtttctgggtaccaatggccagcgtatcccgtatatcattagcattgcgggtagcgtggcggttggcaaaagcacctttgcgcgtgtgctgcaggcgctgctgagccgttggccggagcatcgtcgtgttgaacatatcaccaccgacggcttcctgcacccgaaccaagtgctgaaggagcgtggtctgatggggaaaaagggtttcccggaaagctacgatatgcaccgtctgatgaaatttgttaaagacctgaagagcggtgtgccgaacgttaccgcgccggtgtacagccacctgatctatgatgttattccggacggcgataaaaccgtggttcagccggacatcctgattctggagggtctgaacgtgctgcaaagcggcatggactatccgcacgatccgcaccacgtgtttgttagcgacttcgtggattttagcatctacgttgacgcgccggaggatctgctgcaggcttggtacattaaccgtttcctgaaactgcgtgagggtgcgttcaccgacccggatagctactttcacgggtatgcgaaactgaccaaggaagaggcgatcaaaaccgcgatgaccatttggaaggagatgaacagcgtgaacctgaagcaaaacattctgccgacccgtgaacgtgcgagcctgattctgaccaaaagtgcaaaccacatcgtggaggaagttcgtctgcgtaag

SEQ ID NO: 40 - protein, 326 aa, Artificial Sequence
  Engineered variant of Pantothenate Kinase from Escherichia coli
MHHHHHHGGSGSIKEQTEMTPYLQLDRNQWAAVRDSNPMTLSEDEIARLKGINEDLSLEEVAEVYLPLSRVLNFYISSNLRRQAQLEQFLGTNGQRIPYIISIAGSVAVGKSTFARVLQALLSRWPEHRRVEHITTDGFLHPNQVLKERGLMGKKGFPESYDMHRLMKFVKDLKSGVPNVTAPVYSHLIYDVIPDGDKTVVQPDILILEGLNVLQSGMDYPHDPHHVFVSDFVDFSIYVDAPEDLLQAWYINRFLKLREGAFTDPDSYFHGYAKLTKEEAIKTAMTIWKEMNSVNLKQNILPTRERASLILTKSANHIVEEVRLRK

SEQ ID NO: 41 - DNA, 978 bp, Artificial Sequence
  Engineered variant of Pantothenate Kinase from Escherichia coli
atgcaccatcatcatcatcatggcggtagcggcagcatcaaagagcagaccgagatgaccccgtacctgcaactggaccgtaaccaatgggcggcggtgcgtgatagtaacccgatgaccctgagcgaggacgaaatcgcgcgtctgaagggtattaacgaagatctgagcctggaggaagtggcggaagtctacctgccgctgagccgtgttctgaacttctatattagcagcaacctgcgtcgtcaggcgcagctggaacagtttctgggtaccaatggccagcgtatcccgtatatcattagcattgcgggtagcgtggcggttggcaaaagcacctttgcgcgtgtgctgcaggcgctgctgagccgttggccggagcatcgtcgtgttgaacatatcaccaccgacggcttcctgcacccgaaccaagtgctgaaggagcgtggtctgatggggaaaaagggtttcccggaaagctacgatatgcaccgtctgatgaaatttgttaaagacctgaagagcggtgtgccgaacgttaccgcgccggtgtacagccacctgatctatgatgttattccggacggcgataaaaccgtggttcagccggacatcctgattctggagggtctgaacgtgctgcaaagcggcatggactatccgcacgatccgcaccacgtgtttgttagcgacttcgtggattttagcatctacgttgacgcgccggaggatctgctgcagacctggtacattaaccgtttcctgaaactgcgtgagggtgcgttcaccgacccggatagctactttcacgggtatgcgaaactgaccaaggaagaggcgatcaaaaccgcgatgaccatttggaaggagatgaacagcgtgaacctgaggcaaaacattctgccgacccgtgaacgtgcgagcctgattctgaccaaaagtgcaaaccacatcgtggaggaagttcgtctgcgtaag

SEQ ID NO: 42 - protein, 326 aa, Artificial Sequence
  Engineered variant of Pantothenate Kinase from Escherichia coli
MHHHHHHGGSGSIKEQTEMTPYLQLDRNQWAAVRDSNPMTLSEDEIARLKGINEDLSLEEVAEVYLPLSRVLNFYISSNLRRQAQLEQFLGTNGQRIPYIISIAGSVAVGKSTFARVLQALLSRWPEHRRVEHITTDGFLHPNQVLKERGLMGKKGFPESYDMHRLMKFVKDLKSGVPNVTAPVYSHLIYDVIPDGDKTVVQPDILILEGLNVLQSGMDYPHDPHHVFVSDFVDFSIYVDAPEDLLQTWYINRFLKLREGAFTDPDSYFHGYAKLTKEEAIKTAMTIWKEMNSVNLRQNILPTRERASLILTKSANHIVEEVRLRK

SEQ ID NO: 43 - DNA, 978 bp, Artificial Sequence
  Engineered variant of Pantothenate Kinase from Escherichia coli
atgcaccatcatcatcatcatggcggtagcggcagcatcaaagagcagaccgagatgaccccgtacctgcaactggaccgtaaccaatgggcggcggtgcgtgatagtaacccgatgaccctgagcgaggacgaaatcgcgcgtctgaagggtattaacgaagatctgagcctggaggaagtggcggaagtctacctgccgctgagccgtgttctgaacttctatattagcagcaacctgcgtcgtcaggcgcagctggaacagtttctgggtaccaatggccagcgtatcccgtatatcattagcgttgcgggtagcgtggcggttggcaaaagcacctttgcgcgtgtgctgcaggcgctgctgagccgttggccggagcatcgtcgtgttgaacatatcagcaccgacggcttcctgctgccgaaccaagtgctgaaggagcgtggtctgatggggaaaaagggtttcccggaaagctacgatatgcaccgtctgatgaaatttgttaaagacctgaagagcggtgtgccgaacgttaccgcgccggtgtacagccacctgatctatgatgttattccggacggcgataaaaccgtggttcagccggacatcctgattctggagggtctgaacgtgctgcaaagcggcatggactatccgcacgatccgcaccacgtgtttgttagcgacttcgtggattttagcatctacgttgacgcgccggaggatctgctgcagacctggtacattaaccgtttcctgaaactgcgtgagggtgcgttcaccgacccggatagctactttcacgggtatgcgaaactgaccaaggaagaggcgatcaaaaccgcgatgaccatttggaaggagatgaacagcgtgaacctgaagcaaaacattctgccgacccgtgaacgtgcgagcctgattctgaccaaaagtgcaaaccacatcgtggaggaagttcgtctgcgtaag

SEQ ID NO: 44 - protein, 326 aa, Artificial Sequence
  Engineered variant of Pantothenate Kinase from Escherichia coli
MHHHHHHGGSGSIKEQTEMTPYLQLDRNQWAAVRDSNPMTLSEDEIARLKGINEDLSLEEVAEVYLPLSRVLNFYISSNLRRQAQLEQFLGTNGQRIPYIISVAGSVAVGKSTFARVLQALLSRWPEHRRVEHISTDGFLLPNQVLKERGLMGKKGFPESYDMHRLMKFVKDLKSGVPNVTAPVYSHLIYDVIPDGDKTVVQPDILILEGLNVLQSGMDYPHDPHHVFVSDFVDFSIYVDAPEDLLQTWYINRFLKLREGAFTDPDSYFHGYAKLTKEEAIKTAMTIWKEMNSVNLKQNILPTRERASLILTKSANHIVEEVRLRK

SEQ ID NO: 45 - DNA, 978 bp, Artificial Sequence
  Engineered variant of Pantothenate Kinase from Escherichia coli
atgcaccatcatcatcatcatggcggtagcggcagcatcaaagagcagaccgagatgaccccgtacctgcaactggaccgtaaccaatgggcggcggtgcgtgatagtaacccgatgaccctgagcgaggacgaaatcgcgcgtctgaagggtattaacgaagatctgagcctggaggaagtggcggaagtctacctgccgctgagccgtgttctgaacttctatattagcagcaacctgcgtcgtcaggcgcagctggaacagtttctgggtaccaatggccagcgtatcccgtatatcattagcattgcgggtagcgtggcggttggcaaaagcacctttgcgcgtgtgctgcaggcgctgctgagccgttggccggagcatcgtcgtgttgaacatatcagcaccgacggcttcctgctgccgaaccaagtgctgaaggagcgtggtctgatggggaaaaagggtttcccggaaagctacgatatgcaccgtctgatgaaatttgttaaagacctgaagagcggtgtgccgaacgttaccgcgccggtgtacagccacctgatctatgatgttattccggacggcgataaaaccgtggttcagccggacatcctgattctggagggtctgaacgtgctgcaaagcggcatggactatccgcacgatccgcaccacgtgtttgttagcgacttcgtggattttagcatcttcgttgacgcgccggaggatctgctgcagacctggtacattaaccgtttcctgaaactgcgtgagggtgcgttcaccgacccggatagctactttcacgggtatgcgaaactgaccaaggaagaggcgatcaaaaccgcgatgaccatttggaaggagatgaacagcgtgaacctgaagcaaaacattctgccgacccgtgaacgtgcgagcctgattttgaccaaaagtgcaaaccacatcgtggaggaagttcgtctgcgtaag

SEQ ID NO: 46 - protein, 326 aa, Artificial Sequence
  Engineered variant of Pantothenate Kinase from Escherichia coli
MHHHHHHGGSGSIKEQTEMTPYLQLDRNQWAAVRDSNPMTLSEDEIARLKGINEDLSLEEVAEVYLPLSRVLNFYISSNLRRQAQLEQFLGTNGQRIPYIISIAGSVAVGKSTFARVLQALLSRWPEHRRVEHISTDGFLLPNQVLKERGLMGKKGFPESYDMHRLMKFVKDLKSGVPNVTAPVYSHLIYDVIPDGDKTVVQPDILILEGLNVLQSGMDYPHDPHHVFVSDFVDFSIFVDAPEDLLQTWYINRFLKLREGAFTDPDSYFHGYAKLTKEEAIKTAMTIWKEMNSVNLKQNILPTRERASLILTKSANHIVEEVRLRK

SEQ ID NO: 47 - DNA, 978 bp, Artificial Sequence
  Engineered variant of Pantothenate Kinase from Escherichia coli
atgcaccatcatcatcatcatggcggtagcggcagcatcaaagagcagaccgagatgaccccgtacctgcaactggaccgtaaccaatgggcggcggtgcgtgatagtaacccgatgaccctgagcgaggacgaaatcgcgcgtctgaagggtattaacgaagatctgagcctggaggaagtggcggaagtctacctgccgctgagccgtgttctgaacttctatattagcagcaacctgcgtcgtcaggcgcagctggaacagtttctgggtaccaatggccagcgtatcccgtatatcattagcattgcgggtagcgtggcggttggcaaaagcacctttgcgcgtgtgctgcaggcgctgctgagccgttggccggagcatcgtcgtgttgaacatatcaccaccgacggcttcctgcacccgaaccaagtgctgaaggagcgtggtctgatggggaaaaagggtttcccggaaagctacgatatgcaccgtctgatgaaatttgttaaagacctgaagagcggtgtgccgaacgttaccgcgccggtgtacagccacctgatctatgatgttattccggacggcgataaaaccgtggttcagccggacatcctgattctggagggtctgaacgtgctgcaaagcggcatggactatccgcacgatccgcaccacgtgtttgttagcgacttcgtggattttagcatctacgttgacgcgccggaggatctgctgcagacctggtacattaaccgtttcctgaaactgcgtgagggtgcgttcaccgacccggatagctactttcacgggtatgcgaaactgaccaaggaagaggcgatcaaaaccgcgatgaccatttggaaggagatgaacagcgtgaacctgaagcaaaacattctgccgacccgtgaacgtgcgagcctgattctgaccaaaagtttgaaccacatcgtggaggaagttcgtctgcgtaag

SEQ ID NO: 48 - protein, 326 aa, Artificial Sequence
  Engineered variant of Pantothenate Kinase from Escherichia coli
MHHHHHHGGSGSIKEQTEMTPYLQLDRNQWAAVRDSNPMTLSEDEIARLKGINEDLSLEEVAEVYLPLSRVLNFYISSNLRRQAQLEQFLGTNGQRIPYIISIAGSVAVGKSTFARVLQALLSRWPEHRRVEHITTDGFLHPNQVLKERGLMGKKGFPESYDMHRLMKFVKDLKSGVPNVTAPVYSHLIYDVIPDGDKTVVQPDILILEGLNVLQSGMDYPHDPHHVFVSDFVDFSIYVDAPEDLLQTWYINRFLKLREGAFTDPDSYFHGYAKLTKEEAIKTAMTIWKEMNSVNLKQNILPTRERASLILTKSLNHIVEEVRLRK

SEQ ID NO: 49 - DNA, 978 bp, Artificial Sequence
  Engineered variant of Pantothenate Kinase from Escherichia coli
atgcaccatcatcatcatcatggcggtagcggcagcatcaaagagcagaccgagatgaccccgtacctgcaactggaccgtaaccaatgggcggcggtgcgtgatagtaacccgatgaccctgagcgaggacgaaatcgcgcgtctgaagggtattaacgaagatctgagcctggaggaagtggcggaagtctacctgccgctgagccgtgttctgaacttctatattagcagcaacctgcgtcgtcaggcgcagctggaacagtttctgggtaccaatggccagcgtatcccgtatatcattagcgttgcgggtagcgtggcggttggcaaaagcacctttgcgcgtgtgctgcaggcgctgctgagccgttggccggagcatcgtcgtgttgaacatatcaccaccgacggcttcctgctgccgaaccaagtgctgaaggagcgtggtctgatggggaaaaagggtttcccggaaagctacgatatgcaccgtctgatgaaatttgttaaagacctgaagagcggtgtgccgaacgttaccgcgccggtgtacagccacctgatctatgatgttattccggacggcgataaaaccgtggttcagccggacatcctgattctggagggtctgaacgtgctgcaaggcggcatggactatccgcacgatccgcaccacgtgtttgttagcgacttcgtggattttagcatctacgttgacgcgccggaggatctgctgcagacctggtacattaaccgtttcctgaaactgcgtgagggtgcgttcaccgacccggatagctactttcacgggtatgcgaaactgaccaaggaagaggcgatcaaaaccgcgatgaccatttggaaggagatgaacagcgtgaacctgaagcaaaacattctgccgacccgtgaacgtgcgagcctgattttgaccaaaagtgcaaaccacatcgtggaggaagttcgtctgcgtaag

SEQ ID NO: 50 - protein, 326 aa, Artificial Sequence
  Engineered variant of Pantothenate Kinase from Escherichia coli
MHHHHHHGGSGSIKEQTEMTPYLQLDRNQWAAVRDSNPMTLSEDEIARLKGINEDLSLEEVAEVYLPLSRVLNFYISSNLRRQAQLEQFLGTNGQRIPYIISVAGSVAVGKSTFARVLQALLSRWPEHRRVEHITTDGFLLPNQVLKERGLMGKKGFPESYDMHRLMKFVKDLKSGVPNVTAPVYSHLIYDVIPDGDKTVVQPDILILEGLNVLQGGMDYPHDPHHVFVSDFVDFSIYVDAPEDLLQTWYINRFLKLREGAFTDPDSYFHGYAKLTKEEAIKTAMTIWKEMNSVNLKQNILPTRERASLILTKSANHIVEEVRLRK

SEQ ID NO: 51 - DNA, 978 bp, Artificial Sequence
  Engineered variant of Pantothenate Kinase from Escherichia coli
atgcaccatcatcatcatcatggcggtagcggcagcatcaaagagcagaccgagatgaccccgtacctgcaactggaccgtaaccaatgggcggcgattcgtgatagtaacccgatgaccctgagcgaggacgaaatcgcgcgtctgaagggtattaacgaagatctgagcctggaggaagtggcggaagtctacctgccgctgagccgtgttctgaacttctatattagcagcaacctgcgtcgtcaggcgcagctggaacagtttctgggtaccaatggccagcgtatcccgtatatcattagcattgcgggtagcgtggcggttggcaaaagcacctttgcgcgtgtgctgcaggcgctgctgagccgttggccggagcatcgtcgtgttgaacatatcaccaccgacggcttcctgcacccgaaccaagtgctgaaggagcgtggtctgatggggaaaaagggtttcccggaaagctacgatatgcaccgtctgatgaaatttgttaaagacctgaagagcggtgtgccgaacgttaccgcgccggtgtacagccacctgatctatgatgttattccggacggcgataaaaccgtggttcagccggacatcctgattctggagggtctgaacgtgctgcaaagcggcatggactatccgcacgatccgcaccacgtgtttgttagcgacttcgtggattttagcatctacgttgacgcgccggaggatctgctgcagacctggtacattaaccgtttcctgaaactgcgtgagggtgcgttcaccgacccggatagctactttcacgggtatgcgaaactgaccaaggaagaggcgatcaaaaccgcgatgaccatttggaaggagatgaacagcgtgaacctgaagcaaaacattctgccgacccgtgaacgtgcgagcctgattctgaccaaaagtgcaaaccacatcgtggaggaagttcgtctgcgtaag

SEQ ID NO: 52 - protein, 326 aa, Artificial Sequence
  Engineered variant of Pantothenate Kinase from Escherichia coli
MHHHHHHGGSGSIKEQTEMTPYLQLDRNQWAAIRDSNPMTLSEDEIARLKGINEDLSLEEVAEVYLPLSRVLNFYISSNLRRQAQLEQFLGTNGQRIPYIISIAGSVAVGKSTFARVLQALLSRWPEHRRVEHITTDGFLHPNQVLKERGLMGKKGFPESYDMHRLMKFVKDLKSGVPNVTAPVYSHLIYDVIPDGDKTVVQPDILILEGLNVLQSGMDYPHDPHHVFVSDFVDFSIYVDAPEDLLQTWYINRFLKLREGAFTDPDSYFHGYAKLTKEEAIKTAMTIWKEMNSVNLKQNILPTRERASLILTKSANHIVEEVRLRK

SEQ ID NO: 53 - DNA, 978 bp, Artificial Sequence
  Engineered variant of Pantothenate Kinase from Escherichia coli
atgcaccatcatcatcatcatggcggtagcggcagcatcaaagagcagaccgagatgaccccgtacctgcaactggaccgtaaccaatgggcggcggtgcgtgatagtaacccgatgaccctgagcgaggacgaaatcgcgcgtctgaagggtattaacgaagatctgagcctggaggaagtggcggaagtctacctgccgctgagccgtgttctgaacttctatattagcagctctctgcgtcgtcaggcgcagctggaacagtttctgggtaccaatggccagcgtatcccgtatatcattagcattgcgggtagcgtggcggttggcaaaagcacctttgcgcgtgtgctgcaggcgctgctgagccgttggccggagcatcgtcgtgttgaacatatcaccaccgacggcttcctgcacccgaaccaagtgctgaaggagcgtggtctgatggggaaaaagggtttcccggaaagctacgatatgcaccgtctgatgaaatttgttaaagacctgaagagcggtgtgccgaacgttaccgcgccggtgtacagccacctgatctatgatgttattccggacggcgataaaaccgtggttcagccggacatcctgattctggagggtctgaacgtgctgcaaagcggcatggactatccgcacgatccgcaccacgtgtttgttagcgacttcgtggattttagcatctacgttgacgcgccggaggatctgctgcagacctggtacattaaccgtttcctgaaactgcgtgagggtgcgttcaccgacccggatagctactttcacgggtatgcgaaactgaccaaggaagaggcgatcaaaaccgcgatgaccatttggaaggagatgaacagcgtgaacctgaagcaaaacattctgccgacccgtgaacgtgcgagcctgattctgaccaaaagtgcaaaccacatcgtggaggaagttcgtctgcgtaag

SEQ ID NO: 54 - protein, 326 aa, Artificial Sequence
  Engineered variant of Pantothenate Kinase from Escherichia coli
MHHHHHHGGSGSIKEQTEMTPYLQLDRNQWAAVRDSNPMTLSEDEIARLKGINEDLSLEEVAEVYLPLSRVLNFYISSSLRRQAQLEQFLGTNGQRIPYIISIAGSVAVGKSTFARVLQALLSRWPEHRRVEHITTDGFLHPNQVLKERGLMGKKGFPESYDMHRLMKFVKDLKSGVPNVTAPVYSHLIYDVIPDGDKTVVQPDILILEGLNVLQSGMDYPHDPHHVFVSDFVDFSIYVDAPEDLLQTWYINRFLKLREGAFTDPDSYFHGYAKLTKEEAIKTAMTIWKEMNSVNLKQNILPTRERASLILTKSANHIVEEVRLRK

SEQ ID NO: 55 - DNA, 978 bp, Artificial Sequence
  Engineered variant of Pantothenate Kinase from Escherichia coli
atgcaccatcatcatcatcatggcggtagcggcagcatcaaagagcagaccgagatgaccccgtacctgcaactggaccgtaaccaatgggcggcggtgcgtgatagtaacccgatgaccctgagcgaggacgaaatcgcgcgtctgaagggtattaacgaagatctgagcctggaggaagtggcggaagtctacctgccgctgagccgtgttctgaacttctatattagcagcaacctgcgtcgtcaggcgcagctggaacagtttctgggtaccaatggccagcgtatcccgtatatcattagcattgcgggtagcgtggcggttggcaaaagcacctttgcgcgtgtgctgcaggcgctgctgagccgttggccggagcatcgtcgtgttgaacatatcagcaccgacggcttcctgcatccgaaccaagtgctgaaggagcgtggtctgatggggaaaaagggtttcccggaaagctacgatatgcaccgtctgatgaaatttgttaaagacctgaagagcggtgtgccgaacgttaccgcgccggtgtacagccacctgatctatgatgttgttccggacggcgataaaaccgtggttcagccggacatcctgattctggagggtctgaacgtgctgcaaagcggcatggactatccgcacgatccgcaccacgtgtttgttagcgacttcgtggattttagcatcttcgttgacgcgccggaggatctgctgcagacctggtacattaaccgtttcctgaaactgcgtgagggtgcgttcaccgacccggatagctactttcacgggtatgcgaaactgaccaaggaagaggcgatcaaaaccgcgatgaccatttgggcggagaagaacagcgtgaacctgaagcaaaacattctgccgacccgtgaacgtgcgagcctgattttgaccaaaagtgcaaaccacatcgtggaggaagttcgtttgcgtaag

SEQ ID NO: 56 - protein, 326 aa, Artificial Sequence
  Engineered variant of Pantothenate Kinase from Escherichia coli
MHHHHHHGGSGSIKEQTEMTPYLQLDRNQWAAVRDSNPMTLSEDEIARLKGINEDLSLEEVAEVYLPLSRVLNFYISSNLRRQAQLEQFLGTNGQRIPYIISIAGSVAVGKSTFARVLQALLSRWPEHRRVEHISTDGFLHPNQVLKERGLMGKKGFPESYDMHRLMKFVKDLKSGVPNVTAPVYSHLIYDVVPDGDKTVVQPDILILEGLNVLQSGMDYPHDPHHVFVSDFVDFSIFVDAPEDLLQTWYINRFLKLREGAFTDPDSYFHGYAKLTKEEAIKTAMTIWAEKNSVNLKQNILPTRERASLILTKSANHIVEEVRLRK

SEQ ID NO: 57 - DNA, 978 bp, Artificial Sequence
  Engineered variant of Pantothenate Kinase from Escherichia coli
atgcaccatcatcatcatcatggcggtagcggcagcatcaaagagcagaccgagatgaccccgtacctgcaactggaccgtaaccaatgggcggcggtgcgtgatagtaacccgatgaccctgagcgaggacgaaatcgcgcgtctgaagggtattaacgaagatctgagcctggaggaagtggcggaagtctacctgccgctgagccgtgttctgaacttctatattagcagcaacctgcgtcgtcaggcgcagctggaacagtttctgggtaccaatggccagcgtatcccgtatatcattagcgttgcgggtagcgtggcggttggcaaaagcacctttgcgcgtgtgctgcaggcgctgctgagccgttggccggagcatcgtcgtgttgaacatatcaccaccgacggcttcctgctgccgaaccaagtgctgaaggagcgtggtctgatggggaaaaagggtttcccggaaagctacgatatgcaccgtctgatgaaatttgttaaagacctgaagagcggtgtgccgaacgttaccgcgccggtgtacagccacctgatctatgatgttattccggacggcgataaaaccgtggttcagccggacatcctgattctggagggtctgaacgtgctgcaaagcggcatggactatccgcacgatccgcaccacgtgtttgttagcgacttcgtggattttagcatcttcgttgacgcgccggaggatctgctgcagacctggtacattaaccgtttcctgaaactgcgtgagggtgcgttcaccgacccggatagctactttcacgggtatgcgaaactgaccaaggaagaggcgatcaaaaccgcgatgaccatttggaaggagatgaacagcgtgaacctgaagcaaaacattctgccgacccgtgaacgtgcgagcctgattctgaccaaaagtgcaaaccacatcgtggaggaagttcgtctgcgtaag

SEQ ID NO: 58 - protein, 326 aa, Artificial Sequence
  Engineered variant of Pantothenate Kinase from Escherichia coli
MHHHHHHGGSGSIKEQTEMTPYLQLDRNQWAAVRDSNPMTLSEDEIARLKGINEDLSLEEVAEVYLPLSRVLNFYISSNLRRQAQLEQFLGTNGQRIPYIISVAGSVAVGKSTFARVLQALLSRWPEHRRVEHITTDGFLLPNQVLKERGLMGKKGFPESYDMHRLMKFVKDLKSGVPNVTAPVYSHLIYDVIPDGDKTVVQPDILILEGLNVLQSGMDYPHDPHHVFVSDFVDFSIFVDAPEDLLQTWYINRFLKLREGAFTDPDSYFHGYAKLTKEEAIKTAMTIWKEMNSVNLKQNILPTRERASLILTKSANHIVEEVRLRK

SEQ ID NO: 59 - DNA, 978 bp, Artificial Sequence
  Engineered variant of Pantothenate Kinase from Escherichia coli
atgcaccatcatcatcatcatggcggtagcggcagcatcaaagagcagaccgagatgaccccgtacctgcaactggaccgtaaccaatgggcggcggtgcgtgatagtaacccgatgaccctgagcgaggacgaaatcgcgcgtctgaagggtattaacgaagatctgagcctggaggaagtggcggaagtctacctgccgctgagccgtgttctgaacttctatattagcagcaacctgcgtcgtcaggcgcagctggaacagtttctgggtaccaatggccagcgtatcccgtatatcattagcattgcgggtagcgtggcggttggcaaaagcacctttgcgcgtgtgctgcaggcgctgctgagccgttggccggagcatcgtcgtgttgaacatatcaccaccgacggcttcctgcacccgaaccaagtgctgaaggagcgtggtctgatggggaaaaagggtttcccggaaagctacgatatgcaccgtctgatgaaatttgttaaagacctgaagagcggtgtgccgaacgttaccgcgccggtgtacagccacctgatctatgatgttattccggacggcgataaaaccgtggttcagccggacatcctgattctggagggtctgaacgtgctgcaaagcggcatggactatccgcacgatccgcaccacgtgtttgttagcgacttcgtggattttagcatctacgttgacgcgccggaggatctgctgcagacctggtacattaaccgtttcctgaaactgcgtgagggtgcgttcaccgacccggatagctactttcacgggtatgcgaaactgaccaaggaagaggcgatcaaaaccgcgatgaccatttggaaggagatgaacctggtgaacctgaagcaaaacattctgccgacccgtgaacgtgcgagcctgattctgaccaaaagtgcaaaccacatcgtggaggaagttcgtctgcgtaag

SEQ ID NO: 60 - protein, 326 aa, Artificial Sequence
  Engineered variant of Pantothenate Kinase from Escherichia coli
MHHHHHHGGSGSIKEQTEMTPYLQLDRNQWAAVRDSNPMTLSEDEIARLKGINEDLSLEEVAEVYLPLSRVLNFYISSNLRRQAQLEQFLGTNGQRIPYIISIAGSVAVGKSTFARVLQALLSRWPEHRRVEHITTDGFLHPNQVLKERGLMGKKGFPESYDMHRLMKFVKDLKSGVPNVTAPVYSHLIYDVIPDGDKTVVQPDILILEGLNVLQSGMDYPHDPHHVFVSDFVDFSIYVDAPEDLLQTWYINRFLKLREGAFTDPDSYFHGYAKLTKEEAIKTAMTIWKEMNLVNLKQNILPTRERASLILTKSANHIVEEVRLRK

SEQ ID NO: 61 - DNA, 978 bp, Artificial Sequence
  Engineered variant of Pantothenate Kinase from Escherichia coli
atgcaccatcatcatcatcatggcggtagcggcagcatcaaagagcagaccgagatgaccccgtacctgcaactggaccgtaaccaatgggcggcggtgcgtgatagtaacccgatgaccctgagcgaggacgaaatcgcgcgtctgaagggtattaacgaagatctgagcctggaggaagtggcggaagtctacctgccgctgagccgtgttctgaacttctatattagcagcaacctgcgtcgtcaggcgcagctggaacagtttctgggtaccaatggccagcgtatcccgtatatcattagcattgcgggtagcgtggcggttggcaaaagcacctttgcgcgtgtgctgcaggcgctgctgagccgttggccggagcattctcgtgttgaacatatcaccaccgacggcttcctgcacccgaaccaagtgctgaaggagcgtggtctgatggggaaaaagggtttcccggaaagctacgatatgcaccgtctgatgaaatttgttaaagacctgaagagcggtgtgccgaacgttaccgcgccggtgtacagccacctgatctatgatgttattccggacggcgataaaaccgtggttcagccggacatcctgattctggagggtctgaacgtgctgcaaagcggcatggactatccgcacgatccgcaccacgtgtttgttagcgacttcgtggattttagcatctacgttgacgcgccggaggatctgctgcagacctggtacattaaccgtttcctgaaactgcgtgagggtgcgttcaccgacccggatagctactttcacgggtatgcgaaactgaccaaggaagaggcgatcaaaaccgcgatgaccatttggaaggagatgaacagcgtgaacctgaagcaaaacattctgccgacccgtgaacgtgcgagcctgattctgaccaaaagtgcaaaccacatcgtggaggaagttcgtctgcgtaag

SEQ ID NO: 62 - protein, 326 aa, Artificial Sequence
  Engineered variant of Pantothenate Kinase from Escherichia coli
MHHHHHHGGSGSIKEQTEMTPYLQLDRNQWAAVRDSNPMTLSEDEIARLKGINEDLSLEEVAEVYLPLSRVLNFYISSNLRRQAQLEQFLGTNGQRIPYIISIAGSVAVGKSTFARVLQALLSRWPEHSRVEHITTDGFLHPNQVLKERGLMGKKGFPESYDMHRLMKFVKDLKSGVPNVTAPVYSHLIYDVIPDGDKTVVQPDILILEGLNVLQSGMDYPHDPHHVFVSDFVDFSIYVDAPEDLLQTWYINRFLKLREGAFTDPDSYFHGYAKLTKEEAIKTAMTIWKEMNSVNLKQNILPTRERASLILTKSANHIVEEVRLRK

SEQ ID NO: 63 - DNA, 978 bp, Artificial Sequence
  Engineered variant of Pantothenate Kinase from Escherichia coli
atgcaccatcatcatcatcatggcggtagcggcagcatcaaagagcagaccgagatgaccccgtacctgcaactggaccgtaaccaatgggcggcggtgcgtgatagtaacccgatgaccctgagcgaggacgaaatcgcgcgtctgaagggtattaacgaagatctgagcctggaggaagtggcggaagtctacctgccgctgagccgtgttctgaacttctatattagcagcaacctgcgtcgtcaggcgcagctggaacagtttctgggtaccaatggccagcgtatcccgtatatcattagcattgcgggtagcgtggcggttggcaaaagcacctttgcgcgtgtgctgcaggcgctgctgagccgttggccggagcatcgtcgtgttgaacatatcagtaccgacggcttcctgcacccgaaccaagtgctgaaggagcgtggtctgatggggaaaaagggtttcccggaaagctacgatatgcaccgtctgatgaaatttgttaaagacctgaagagcggtgtgccgaacgttaccgcgccggtgtacagccacctgatctatgatgttattccggacggcgataaaaccgtggttcagccggacatcctgattctggagggtctgaacgtgctgcaaagcggcatggactatccgcacgatccgcaccacgtgtttgttagcgacttcgtggattttagcatctacgttgacgcgccggaggatctgctgcagacctggtacattaaccgtttcctgaaactgcgtgagggtgcgttcaccgacccggatagctactttcacgggtatgcgaaactgaccaaggaagaggcgatcaaaaccgcgatgaccatttggaaggagatgaacagcgtgaacctgaagcaaaacattctgccgacccgtgagcgtgcgagcctgattttgaccaaaagtgcaaaccacatcgtggaggaagttcgtctgcgtaag

SEQ ID NO: 64 - protein, 326 aa, Artificial Sequence; identical to SEQ ID NO: 26
  Engineered variant of Pantothenate Kinase from Escherichia coli

SEQ ID NO: 65 - DNA, 978 bp, Artificial Sequence
  Engineered variant of Pantothenate Kinase from Escherichia coli
atgcaccatcatcatcatcatggcggtagcggcagcatcaaagagcagaccgagatgaccccgtacctgcaactggaccgtaaccaatgggcggcggtgcgtgatagtaacccgatgaccctgagcgaggacgaaatcgcgcgtctgaagggtattaacgaagatctgagcctggaggaagtggcggaagtctacctgccgctgagccgtgttctgaacttctatattagcagcaacctgcgtcgtcaggcgcagctggaacagtttctgggtaccaatggccagcgtatcccgtatatcattagcattgcgggtagcgtggcggttggcaaaagcacctttgcgcgtgtgctgcaggcgctgctgagccgttggccggagcatgggcgtgttgaacatatcaccaccgacggcttcctgcacccgaaccaagtgctgaaggagcgtggtctgatggggaaaaagggtttcccggaaagctacgatatgcaccgtctgatgaaatttgttaaagacctgaagagcggtgtgccgaacgttaccgcgccggtgtacagccacctgatctatgatgttattccggacggcgataaaaccgtggttcagccggacatcctgattctggagggtctgaacgtgctgcaaagcggcatggactatccgcacgatccgcaccacgtgtttgttagcgacttcgtggattttagcatctacgttgacgcgccggaggatctgctgcagacctggtacattaaccgtttcctgaaactgcgtgagggtgcgttcaccgacccggatagctactttcacgggtatgcgaaactgaccaaggaagaggcgatcaaaaccgcgatgaccatttggaaggagatgaacagcgtgaacctgaagcaaaacattctgccgacccgtgaacgtgcgagcctgattctgaccaaaagtgcaaaccacatcgtggaggaagttcgtctgcgtaag

SEQ ID NO: 66 - protein, 326 aa, Artificial Sequence
  Engineered variant of Pantothenate Kinase from Escherichia coli
MHHHHHHGGSGSIKEQTEMTPYLQLDRNQWAAVRDSNPMTLSEDEIARLKGINEDLSLEEVAEVYLPLSRVLNFYISSNLRRQAQLEQFLGTNGQRIPYIISIAGSVAVGKSTFARVLQALLSRWPEHGRVEHITTDGFLHPNQVLKERGLMGKKGFPESYDMHRLMKFVKDLKSGVPNVTAPVYSHLIYDVIPDGDKTVVQPDILILEGLNVLQSGMDYPHDPHHVFVSDFVDFSIYVDAPEDLLQTWYINRFLKLREGAFTDPDSYFHGYAKLTKEEAIKTAMTIWKEMNSVNLKQNILPTRERASLILTKSANHIVEEVRLRK

SEQ ID NO: 67 - DNA, 978 bp, Artificial Sequence
  Engineered variant of Pantothenate Kinase from Escherichia coli
atgcaccatcatcatcatcatggcggtagcggcagcatcaaagagcagaccgagatgaccccgtacctgcaactggaccgtaaccaatgggcggcggtgcgtgatagtaacccgatgaccctgagcgaggacgaaatcgcgcgtctgaagggtattaacgaagatctgagcctggaggaagtggcggaagtctacctgccgctgagccgtgttctgaacttctatattagcagcaacctgcgtcgtcaggcgcagctggaacagtttctgggtaccaatggccagcgtatcccgtatatcattagcattgcgggtagcgtggcggttggcaaaagcacctttgcgcgtgtgctgcagacgctgctgagccgttggccggagcatcgtcgtgttgaacatatcaccaccgacggcttcctgcacccgaaccaagtgctgaaggagcgtggtctgatggggaaaaagggtttcccggaaagctacgatatgcaccgtctgatgaaatttgttaaagacctgaagagcggtgtgccgaacgttaccgcgccggtgtacagccacctgatctatgatgttattccggacggcgataaaaccgtggttcagccggacatcctgattctggagggtctgaacgtgctgcaaagcggcatggactatccgcacgatccgcaccacgtgtttgttagcgacttcgtggattttagcatctacgttgacgcgccggaggatctgctgcagacctggtacattaaccgtttcctgaaactgcgtgagggtgcgttcaccgacccggatagctactttcacgggtatgcgaaactgaccaaggaagaggcgatcaaaaccgcgatgaccatttggaaggagatgaacagcgtgaacctgaagcaaaacattctgccgacccgtgaacgtgcgagcctgattctgaccaaaagtgcaaaccacatcgtggaggaagttcgtctgcgtaag

SEQ ID NO: 68 - protein, 326 aa, Artificial Sequence
  Engineered variant of Pantothenate Kinase from Escherichia coli
MHHHHHHGGSGSIKEQTEMTPYLQLDRNQWAAVRDSNPMTLSEDEIARLKGINEDLSLEEVAEVYLPLSRVLNFYISSNLRRQAQLEQFLGTNGQRIPYIISIAGSVAVGKSTFARVLQTLLSRWPEHRRVEHITTDGFLHPNQVLKERGLMGKKGFPESYDMHRLMKFVKDLKSGVPNVTAPVYSHLIYDVIPDGDKTVVQPDILILEGLNVLQSGMDYPHDPHHVFVSDFVDFSIYVDAPEDLLQTWYINRFLKLREGAFTDPDSYFHGYAKLTKEEAIKTAMTIWKEMNSVNLKQNILPTRERASLILTKSANHIVEEVRLRK

SEQ ID NO: 69 - DNA, 978 bp, Artificial Sequence
  Engineered variant of Pantothenate Kinase from Escherichia coli
atgcaccatcatcatcatcatggcggtagcggcagcatcaaagagcagaccgagatgaccccgtacctgcaactggaccgtaaccaatgggcggcggtgcgtgatagtaacccgatgaccctgagcgaggacgaaatcgcgcgtctgaagggtattaacgaagatctgagcctggaggaagtggcggaagtctacctgccgctgagccgtgttctgaacttctatattagcagcaacctgcgtcgtcaggcgcagctggaacagtttctgggtaccaatggccagcctatcccgtatatcattagcattgcgggtagcgtggcggttggcaaaagcacctttgcgcgtgtgctgcaggcgctgctgagccgttggccggagcatcgtcgtgttgaacatatcaccaccgacggcttcctgcacccgaaccaagtgctgaaggagcgtggtctgatggggaaaaagggtttcccggaaagctacgatatgcaccgtctgatgaaatttgttaaagacctgaagagcggtgtgccgaacgttaccgcgccggtgtacagccacctgatctatgatgttattccggacggcgataaaaccgtggttcagccggacatcctgattctggagggtctgaacgtgctgcaaagcggcatggactatccgcacgatccgcaccacgtgtttgttagcgacttcgtggattttagcatctacgttgacgcgccggaggatctgctgcagacctggtacattaaccgtttcctgaaactgcgtgagggtgcgttcaccgacccggatagctactttcacgggtatgcgaaactgaccaaggaagaggcgatcaaaaccgcgatgaccatttggaaggagatgaacagcgtgaacctgaagcaaaacattctgccgacccgtgaacgtgcgagcctgattctgaccaaaagtgcaaaccacatcgtggaggaagttcgtctgcgtaag

SEQ ID NO: 70 - protein, 326 aa, Artificial Sequence
  Engineered variant of Pantothenate Kinase from Escherichia coli
MHHHHHHGGSGSIKEQTEMTPYLQLDRNQWAAVRDSNPMTLSEDEIARLKGINEDLSLEEVAEVYLPLSRVLNFYISSNLRRQAQLEQFLGTNGQPIPYIISIAGSVAVGKSTFARVLQALLSRWPEHRRVEHITTDGFLHPNQVLKERGLMGKKGFPESYDMHRLMKFVKDLKSGVPNVTAPVYSHLIYDVIPDGDKTVVQPDILILEGLNVLQSGMDYPHDPHHVFVSDFVDFSIYVDAPEDLLQTWYINRFLKLREGAFTDPDSYFHGYAKLTKEEAIKTAMTIWKEMNSVNLKQNILPTRERASLILTKSANHIVEEVRLRK

SEQ ID NO: 71 - DNA, 978 bp, Artificial Sequence
  Engineered variant of Pantothenate Kinase from Escherichia coli
atgcaccatcatcatcatcatggcggtagcggcagcatcaaagagcagaccgagatgaccccgtacctgcaactggaccgtaaccaatgggcggcggtgcgtgatagtaacccgatgaccctgagcgaggacgaaatcgcgcgtctgaagggtattaacgaagatctgagcctggaggaagtggcggaagtctacctgccgctgagccgtgttctgaacttctatattagcagcaacctgcgtcgtcaggcgcagctggaacagtttctgggtaccaatggccagcgtatcccgtatatcattagcattgcgggtagcgtggcggttggcaaaagcacctttgcgcgtgtgctgcaggcgctgctgagccgttggccggagcatcgtcgtgttgaacatatcaccaccgacggcttcctgcacccgaaccaagtgctgaaggagcgtggtctgatggggaaaaagggtttcccggaaagctacgatatgcaccgtctgatgaaatttgttaaagacctgaagagcggtgtgccgaacgttaccgcgccggtgtacagccacctgatctatgatgttattccggacggcgataaaaccgtggttcagccggacatcctgattctggagggtctgaacgtgctgcaaagcggcatggactatccgcacgatccgcaccacacttttgttagcgacttcgtggattttagcatctacgttgacgcgccggaggatctgctgcagacctggtacattaaccgtttcctgaaactgcgtgagggtgcgttcaccgacccggatagctactttcacgggtatgcgaaactgaccaaggaagaggcgatcaaaaccgcgatgaccatttggaaggagatgaacagcgtgaacctgaagcaaaacattctgccgacccgtgaacgtgcgagcctgattctgaccaaaagtgcaaaccacatcgtggaggaagttcgtctgcgtaag

SEQ ID NO: 72 - protein, 326 aa, Artificial Sequence
  Engineered variant of Pantothenate Kinase from Escherichia coli
MHHHHHHGGSGSIKEQTEMTPYLQLDRNQWAAVRDSNPMTLSEDEIARLKGINEDLSLEEVAEVYLPLSRVLNFYISSNLRRQAQLEQFLGTNGQRIPYIISIAGSVAVGKSTFARVLQALLSRWPEHRRVEHITTDGFLHPNQVLKERGLMGKKGFPESYDMHRLMKFVKDLKSGVPNVTAPVYSHLIYDVIPDGDKTVVQPDILILEGLNVLQSGMDYPHDPHHTFVSDFVDFSIYVDAPEDLLQTWYINRFLKLREGAFTDPDSYFHGYAKLTKEEAIKTAMTIWKEMNSVNLKQNILPTRERASLILTKSANHIVEEVRLRK

SEQ ID NO: 73 - DNA, 978 bp, Artificial Sequence
  Engineered variant of Pantothenate Kinase from Escherichia coli
atgcaccatcatcatcatcatggcggtagcggcagcatcaaagagcagaccgagatgaccccgtacctgcaactggaccgtaaccaatgggcggcggtgcgtgatagtaacccgatgaccctgagcgaggacgaaatcgcgcgtctgaagggtattaacgaagatctgagcctggaggaagtggcggaagtctacctgccgctgagccgtgttctgaacttctatattagcagcaacctgcgtcgtcaggcgcagctggaacagtttctgggtaccaatggccagcgtatcccgtatatcattagcattgcgggtagcgtggcggttggcaaaagcacctttgcgcgtgtgctgcaggcgctgctgagccgttggccggagcatcgtcgtgttgaacatatcaccaccgacggcttcctgcacccgaaccaagtgctgaaggagcgtggtctgatggggaaaaagggtttcccggaaagctacgatatgcaccgtctgatgaaatttgttaaagacctgaagagcggtgtgccgaacgttaccgcgccggtgtacagccacctgatctatgatgttattccggcgggcgataaaaccgtggttcagccggacatcctgattctggagggtctgaacgtgctgcaaagcggcatggactatccgcacgatccgcaccacgtgtttgttagcgacttcgtggattttagcatctacgttgacgcgccggaggatctgctgcagacctggtacattaaccgtttcctgaaactgcgtgagggtgcgttcaccgacccggatagctactttcacgggtatgcgaaactgaccaaggaagaggcgatcaaaaccgcgatgaccatttggaaggagatgaacagcgtgaacctgaagcaaaacattctgccgacccgtgaacgtgcgagcctgattctgaccaaaagtgcaaaccacatcgtggaggaagttcgtctgcgtaag

SEQ ID NO: 74 - protein, 326 aa, Artificial Sequence
  Engineered variant of Pantothenate Kinase from Escherichia coli
MHHHHHHGGSGSIKEQTEMTPYLQLDRNQWAAVRDSNPMTLSEDEIARLKGINEDLSLEEVAEVYLPLSRVLNFYISSNLRRQAQLEQFLGTNGQRIPYIISIAGSVAVGKSTFARVLQALLSRWPEHRRVEHITTDGFLHPNQVLKERGLMGKKGFPESYDMHRLMKFVKDLKSGVPNVTAPVYSHLIYDVIPAGDKTVVQPDILILEGLNVLQSGMDYPHDPHHVFVSDFVDFSIYVDAPEDLLQTWYINRFLKLREGAFTDPDSYFHGYAKLTKEEAIKTAMTIWKEMNSVNLKQNILPTRERASLILTKSANHIVEEVRLRK

SEQ ID NO: 75 - DNA, 978 bp, Artificial Sequence
  Engineered variant of Pantothenate Kinase from Escherichia coli
atgcaccatcatcatcatcatggcggtagcggcagcatcaaagagcagaccgagatgaccccgtacctgcaactggaccgtaaccaatgggcggcggtgcgtgatagtaacccgatgaccctgagcgaggacgaaatcgcgcgtctgaagggtattaacgaagatctgagcctggaggaagtggcggaagtctacctgccgctgagccgtgttctgaacttctatattagcagcaacctgcgtcgtcaggcgcagctggaacagtttctgggtaccaatggccagcgtatcccgtatatcattagcgttgcgggtagcgtggcggttggcaaaagcacctttgcgcgtgtgctgcaggcgctgctgagccgttggccggagcatcgtcgtgttgaacatatcagcaccgacggcttcctgcatccgaaccaagtgctgaaggagcgtggtctgatggggaaaaagggtttcccggaaagctacgatatgcaccgtctgatgaaatttgttaaagacctgaagagcggtgtgccgaacgttaccgcgccggtgtacagccacctgatctatgatgttattccggacggcgataaaaccgtggttcagccggacatcctgattctggagggtctgaacgtgctgcaaggcggcatggactatccgcacgatccgcaccacgtgtttgttagcgacttcgtggattttagcatctacgttgacgcgccggaggatctgctgcagacctggtacattaaccgtttcctgaaactgcgtgagggtgcgttcaccgacccggatagctactttcacgggtatgcgaaactgaccaaggaagaggcgatcaaaaccgcgatgaccatttggaaggagatgaacagcgtgaaccttaagcaaaacattctgccgacccgtgaacgtgcgagcctgattctgaccaaaagtgcaaaccacatcgtggaggaagttcgtctgcgtaag

SEQ ID NO: 76 - protein, 326 aa, Artificial Sequence
  Engineered variant of Pantothenate Kinase from Escherichia coli
MHHHHHHGGSGSIKEQTEMTPYLQLDRNQWAAVRDSNPMTLSEDEIARLKGINEDLSLEEVAEVYLPLSRVLNFYISSNLRRQAQLEQFLGTNGQRIPYIISVAGSVAVGKSTFARVLQALLSRWPEHRRVEHISTDGFLHPNQVLKERGLMGKKGFPESYDMHRLMKFVKDLKSGVPNVTAPVYSHLIYDVIPDGDKTVVQPDILILEGLNVLQGGMDYPHDPHHVFVSDFVDFSIYVDAPEDLLQTWYINRFLKLREGAFTDPDSYFHGYAKLTKEEAIKTAMTIWKEMNSVNLKQNILPTRERASLILTKSANHIVEEVRLRK

SEQ ID NO: 77 - DNA, 978 bp, Artificial Sequence
  Engineered variant of Pantothenate Kinase from Escherichia coli
atgcaccatcatcatcatcatggcggtagcggcagcatcaaagagcagaccgagatgaccccgtacctgcaactggaccgtaaccaatgggcggcggtgcgtgatagtaacccgatgaccctgagcgaggacgaaatcgcgcgtctgaagggtattaacgaagatctgagcctggaggaagtggcggaagtctacctgccgctgagccgtgttctgaacttctatattagcagcaacctgcgtcgtcaggcgcagctggaacagtttctgggtaccaatggccagcgtatcccgtatatcattagcattgcgggtagcgtggcggttggcaaaagcacctttgcgcgtgtgctgcaggcgctgctgagccgttggccggagcatcgtcgtgttgaacatatcaccaccgacggcttcctgcacccgaaccaagtgctgaaggagcgtggtctgatggggaaaaagggtttcccggaaagctacgatatgcaccgtctgatgaaatttgttaaagacctgaagagcggtgtgccgaacgttaccgcgccggtgtacagccacctgatctatgatgttattcatgacggcgataaaaccgtggttcagccggacatcctgattctggagggtctgaacgtgctgcaaagcggcatggactatccgcacgatccgcaccacgtgtttgttagcgacttcgtggattttagcatctacgttgacgcgccggaggatctgctgcagacctggtacattaaccgtttcctgaaactgcgtgagggtgcgttcaccgacccggatagctactttcacgggtatgcgaaactgaccaaggaagaggcgatcaaaaccgcgatgaccatttggaaggagatgaacagcgtgaacctgaagcaaaacattctgccgacccgtgaacgtgcgagcctgattctgaccaaaagtgcaaaccacatcgtggaggaagttcgtctgcgtaag

SEQ ID NO: 78 - protein, 326 aa, Artificial Sequence
  Engineered variant of Pantothenate Kinase from Escherichia coli
MHHHHHHGGSGSIKEQTEMTPYLQLDRNQWAAVRDSNPMTLSEDEIARLKGINEDLSLEEVAEVYLPLSRVLNFYISSNLRRQAQLEQFLGTNGQRIPYIISIAGSVAVGKSTFARVLQALLSRWPEHRRVEHITTDGFLHPNQVLKERGLMGKKGFPESYDMHRLMKFVKDLKSGVPNVTAPVYSHLIYDVIHDGDKTVVQPDILILEGLNVLQSGMDYPHDPHHVFVSDFVDFSIYVDAPEDLLQTWYINRFLKLREGAFTDPDSYFHGYAKLTKEEAIKTAMTIWKEMNSVNLKQNILPTRERASLILTKSANHIVEEVRLRK

SEQ ID NO: 79 - DNA, 978 bp, Artificial Sequence
  Engineered variant of Pantothenate Kinase from Escherichia coli
atgcaccatcatcatcatcatggcggtagcggcagcatcaaagagcagaccgagatgaccccgtacctgcaactggaccgtaaccaatgggcggcggtggcggatagtaacccgatgaccctgagcgaggacgaaatcgcgcgtctgaagggtattaacgaagatctgagcctggaggaagtggcggaagtctacctgccgctgagccgtgttctgaacttctatattagcagcaacctgcgtcgtcaggcgcagctggaacagtttctgggtaccaatggccagcgtatcccgtatatcattagcattgcgggtagcgtggcggttggcaaaagcacctttgcgcgtgtgctgcaggcgctgctgagccgttggccggagcatcgtcgtgttgaacatatcaccaccgacggcttcctgcacccgaaccaagtgctgaaggagcgtggtctgatggggaaaaagggtttcccggaaagctacgatatgcaccgtctgatgaaatttgttaaagacctgaagagcggtgtgccgaacgttaccgcgccggtgtacagccacctgatctatgatgttattccggacggcgataaaaccgtggttcagccggacatcctgattctggagggtctgaacgtgctgcaaagcggcatggactatccgcacgatccgcaccacgtgtttgttagcgacttcgtggattttagcatctacgttgacgcgccggaggatctgctgcagacctggtacattaaccgtttcctgaaactgcgtgagggtgcgttcaccgacccggatagctactttcacgggtatgcgaaactgaccaaggaagaggcgatcaaaaccgcgatgaccatttggaaggagatgaacagcgtgaacctgaagcaaaacattctgccgacccgtgaacgtgcgagcctgattctgaccaaaagtgcaaaccacatcgtggaggaagttcgtctgcgtaag

SEQ ID NO: 80 - protein, 326 aa, Artificial Sequence
  Engineered variant of Pantothenate Kinase from Escherichia coli
MHHHHHHGGSGSIKEQTEMTPYLQLDRNQWAAVADSNPMTLSEDEIARLKGINEDLSLEEVAEVYLPLSRVLNFYISSNLRRQAQLEQFLGTNGQRIPYIISIAGSVAVGKSTFARVLQALLSRWPEHRRVEHITTDGFLHPNQVLKERGLMGKKGFPESYDMHRLMKFVKDLKSGVPNVTAPVYSHLIYDVIPDGDKTVVQPDILILEGLNVLQSGMDYPHDPHHVFVSDFVDFSIYVDAPEDLLQTWYINRFLKLREGAFTDPDSYFHGYAKLTKEEAIKTAMTIWKEMNSVNLKQNILPTRERASLILTKSANHIVEEVRLRK

SEQ ID NO: 81 - DNA, 978 bp, Artificial Sequence
  Engineered variant of Pantothenate Kinase from Escherichia coli
atgcaccatcatcatcatcatggcggtagcggcagcatcaaagagcagaccgagctgaccccgtacctgcaactggaccgtaaccaatgggcggcggtgcgtgatagtaacccgatgaccctgagcgaggacgaaatcgcgcgtctgaagggtattaacgaagatctgagcctggaggaagtggcggaagtctacctgccgctgagccgtgttctgaacttctatattagcagcaacctgcgtcgtcaggcgcagctggaacagtttctgggtaccaatggccagcgtatcccgtatatcattagcattgcgggtagcgtggcggttggcaaaagcacctttgcgcgtgtgctgcaggcgctgctgagccgttggccggagcatcgtcgtgttgaacatatcaccaccgacggcttcctgcacccgaaccaagtgctgaaggagcgtggtctgatggggaaaaagggtttcccggaaagctacgatatgcaccgtctgatgaaatttgttaaagacctgaagagcggtgtgccgaacgttaccgcgccggtgtacagccacctgatctatgatgttattccggacggcgataaaaccgtggttcagccggacatcctgattctggagggtctgaacgtgctgcaaagcggcatggactatccgcacgatccgcaccacgtgtttgttagcgacttcgtggattttagcatctacgttgacgcgccggaggatctgctgcagacctggtacattaaccgtttcctgaaactgcgtgagggtgcgttcaccgacccggatagctactttcacgggtatgcgaaactgaccaaggaagaggcgatcaaaaccgcgatgaccatttggaaggagatgaacagcgtgaacctgaagcaaaacattctgccgacccgtgaacgtgcgagcctgattctgaccaaaagtgcaaaccacatcgtggaggaagttcgtctgcgtaag

SEQ ID NO: 82 - protein, 326 aa, Artificial Sequence
  Engineered variant of Pantothenate Kinase from Escherichia coli
MHHHHHHGGSGSIKEQTELTPYLQLDRNQWAAVRDSNPMTLSEDEIARLKGINEDLSLEEVAEVYLPLSRVLNFYISSNLRRQAQLEQFLGTNGQRIPYIISIAGSVAVGKSTFARVLQALLSRWPEHRRVEHITTDGFLHPNQVLKERGLMGKKGFPESYDMHRLMKFVKDLKSGVPNVTAPVYSHLIYDVIPDGDKTVVQPDILILEGLNVLQSGMDYPHDPHHVFVSDFVDFSIYVDAPEDLLQTWYINRFLKLREGAFTDPDSYFHGYAKLTKEEAIKTAMTIWKEMNSVNLKQNILPTRERASLILTKSANHIVEEVRLRK

SEQ ID NO: 83 - DNA, 978 bp, Artificial Sequence
  Engineered variant of Pantothenate Kinase from Escherichia coli
atgcaccatcatcatcatcatggcggtagcggcagcatcaaagagcagaccgagatgaccccgtacctgcaactggaccgtaaccaatgggcggcggtgcgtgatagtaacccgatgaccctgagcgaggacgaaatcgcgcgtctgaagggtattaacgaagatctgagcctggaggaagtggcggaagtctacctgccgctgagccgtgttctgaacttctatattagcagcaacctgcgtcgtcaggcgcagctggaacagtttctgggtaccaatggccagcgtatcccgtatatcattagcattgcgggtagcgtggcggttggcaaaagcacctttgcgcgtgtgctgcaggcgctgctgagccgttggccggagcatcgtcgtgttgaacatatcaccaccgacggcttcctgcacccgaaccaagtgctgaaggagcgtggtctgatggggaaaaagggtttcccggaaagctacgatatgcaccgtctgatgaaatttgttaaagacctgaagagcggtgtgccgaacgttaccgcgccggtgtacagccacctgatctatgatgttattccggacggcgataaaaccgtggttcagccggacatcctgattctggagggtctgaacgtgctgcaaagcggcatggactatccgggggatccgcaccacgtgtttgttagcgacttcgtggattttagcatctacgttgacgcgccggaggatctgctgcagacctggtacattaaccgtttcctgaaactgcgtgagggtgcgttcaccgacccggatagctactttcacgggtatgcgaaactgaccaaggaagaggcgatcaaaaccgcgatgaccatttggaaggagatgaacagcgtgaacctgaagcaaaacattctgccgacccgtgaacgtgcgagcctgattctgaccaaaagtgcaaaccacatcgtggaggaagttcgtctgcgtaag

SEQ ID NO: 84 - protein, 326 aa, Artificial Sequence
  Engineered variant of Pantothenate Kinase from Escherichia coli
MHHHHHHGGSGSIKEQTEMTPYLQLDRNQWAAVRDSNPMTLSEDEIARLKGINEDLSLEEVAEVYLPLSRVLNFYISSNLRRQAQLEQFLGTNGQRIPYIISIAGSVAVGKSTFARVLQALLSRWPEHRRVEHITTDGFLHPNQVLKERGLMGKKGFPESYDMHRLMKFVKDLKSGVPNVTAPVYSHLIYDVIPDGDKTVVQPDILILEGLNVLQSGMDYPGDPHHVFVSDFVDFSIYVDAPEDLLQTWYINRFLKLREGAFTDPDSYFHGYAKLTKEEAIKTAMTIWKEMNSVNLKQNILPTRERASLILTKSANHIVEEVRLRK

SEQ ID NO: 85 - DNA, 978 bp, Artificial Sequence
  Engineered variant of Pantothenate Kinase from Escherichia coli
atgcaccatcatcatcatcatggcggtagcggcagcatcaaagagcagaccgagatgaccccgtacctgcaactggaccgtaaccaatgggcggcggtgcgtgatagtaacccgatgaccctgagcgaggacgaaatcgcgcgtctgaagggtattaacgaagatctgagcctggaggaagtggcggaagtctacctgccgctgagccgtgttctgaacttctatattagcagcaacctgcgtcgtcaggcgcagctggaacagtttctgggtaccaatggccagcgtatcccgtatatcattagcgttgcgggtagcgtggcggttggcaaaagcacctttgcgcgtgtgctgcaggcgctgctgagccgttggccggagcatcgtcgtgttgaacatatcaccaccgacggcttcctgctgccgaaccaagtgctgaaggagcgtggtctgatggggaaaaagggtttcccggaaagctacgatatgcaccgtctgatgaaatttgttaaagacctgaagagcggtgtgccgaacgttaccgcgccggtgtacagccacctgatctatgatgttgttccggacggcgataaaaccgtggttcagccggacatcctgattctggagggtctgaacgtgctgcaaggcggcatggactatccgcacgatccgcaccacgtgtttgttagcgacttcgtggattttagcatcttcgttgacgcgccggaggatctgctgcagacctggtacattaaccgtttcctgaaactgcgtgagggtgcgttcaccgacccggatagctactttcacgggtatgcgaaactgaccaaggaagaggcgatcaaaaccgcgatgaccatttggaaggagatgaacagcgtgaacctgaagcaaaacattctgccgacccgtgaacgtgcgagcctgattttgaccaaaagtgcaaaccacatcgtggaggaagttcgtctgcgtaag

SEQ ID NO: 86 - protein, 326 aa, Artificial Sequence
  Engineered variant of Pantothenate Kinase from Escherichia coli
MHHHHHHGGSGSIKEQTEMTPYLQLDRNQWAAVRDSNPMTLSEDEIARLKGINEDLSLEEVAEVYLPLSRVLNFYISSNLRRQAQLEQFLGTNGQRIPYIISVAGSVAVGKSTFARVLQALLSRWPEHRRVEHITTDGFLLPNQVLKERGLMGKKGFPESYDMHRLMKFVKDLKSGVPNVTAPVYSHLIYDVVPDGDKTVVQPDILILEGLNVLQGGMDYPHDPHHVFVSDFVDFSIFVDAPEDLLQTWYINRFLKLREGAFTDPDSYFHGYAKLTKEEAIKTAMTIWKEMNSVNLKQNILPTRERASLILTKSANHIVEEVRLRK

SEQ ID NO: 87 - DNA, 978 bp, Artificial Sequence
  Engineered variant of Pantothenate Kinase from Escherichia coli
atgcaccatcatcatcatcatggcggtagcggcagcatcaaagagcagaccgagatgaccccgtacctgcaactggaccgtaaccaatgggcggcggtgcgtgatagtaacccgatgaccctgagcgaggacgaaatcgcgcgtctgaagggtattaacgaagatctgagcctggaggaagtggcggaagtctacctgccgctgagccgtgttctgaacttctatattagcagcaacctgcgtcgtcaggcgcagctggaacagtttctgggtaccaatggccagcgtatcccgtatatcattagcgttgcgggtagcgtggcggttggcaaaagcacctttgcgcgtgtgctgcaggcgctgctgagccgttggccggagcatcgtcgtgttgaacatatcagcaccgacggcttcctgcatccgaaccaagtgctgaaggagcgtggtctgatggggaaaaagggtttcccggaaagctacgatatgcaccgtctgatgaaatttgttaaagacctgaagagcggtgtgccgaacgttaccgcgccggtgtacagccacctgatctatgatgttattccggacggcgataaaaccgtggttcagccggacatcctgattctggagggtctgaacgtgctgcaaagcggcatggactatccgcacgatccgcaccacgtgtttgttagcgacttcgtggattttagcatctacgttgacgcgccggaggatctgctgcagacctggtacattaaccgtttcctgaaactgcgtgagggtgcgttcaccgacccggatagctactttcacgggtatgcgaaactgaccaaggaagaggcgatcaaaaccgcgatgaccatttggaaggagatgaacagcgtgaacctgaagcaaaacattctgccgacccgtgaacgtgcgagcctgattttgaccaaaagtgcaaaccacatcgtggaggaagttcgtctgcgtaag

SEQ ID NO: 88 - protein, 326 aa, Artificial Sequence
  Engineered variant of Pantothenate Kinase from Escherichia coli
MHHHHHHGGSGSIKEQTEMTPYLQLDRNQWAAVRDSNPMTLSEDEIARLKGINEDLSLEEVAEVYLPLSRVLNFYISSNLRRQAQLEQFLGTNGQRIPYIISVAGSVAVGKSTFARVLQALLSRWPEHRRVEHISTDGFLHPNQVLKERGLMGKKGFPESYDMHRLMKFVKDLKSGVPNVTAPVYSHLIYDVIPDGDKTVVQPDILILEGLNVLQSGMDYPHDPHHVFVSDFVDFSIYVDAPEDLLQTWYINRFLKLREGAFTDPDSYFHGYAKLTKEEAIKTAMTIWKEMNSVNLKQNILPTRERASLILTKSANHIVEEVRLRK

SEQ ID NO: 89 - DNA, 978 bp, Artificial Sequence
  Engineered variant of Pantothenate Kinase from Escherichia coli
atgcaccatcatcatcatcatggcggtagcggcagcatcaaagagcagaccgagatgaccccgtacctgcaactggaccgtaaccaatgggcggcggtgcgtgatagtaacccgatgaccctgagcgaggacgaaatcgcgcgtctgaagggtattaacgaagatctgagcctggaggaagtggcggaagtctacctgccgctgagccgtgttctgaacttctatattagcagcaacctgcgtcgtcaggcgcagctggaacagtttctgggtaccaatggccagcgtatcccgtatatcattagcgttgcgggtagcgtggcggttggcaaaagcacctttgcgcgtgtgctgcaggcgctgctgagccgttggccggagcatcgtcgtgttgaacatatcaccaccgacggcttcctgctgccgaaccaagtgctgaaggagcgtggtctgatggggaaaaagggtttcccggaaagctacgatatgcaccgtctgatgaaatttgttaaagacctgaagagcggtgtgccgaacgttaccgcgccggtgtacagccacctgatctatgatgttattccggacggcgataaaaccgtggttcagccggacatcctgattctggagggtctgaacgtgctgcaaagcggcatggactatccgcacgatccgcaccacgtgtttgttagcgacttcgtggattttagcatctacgttgacgcgccggaggatctgctgcagacctggtacattaaccgtttcctgaaactgcgtgagggtgcgttcaccgacccggatagctactttcacgggtatgcgaaactgaccaaggaagaggcgatcaaaaccgcgatgaccatttggaaggagatgaacagcgtgaacctgaagcaaaacattctgccgacccgtgaacgtgcgagcctgattttgaccaaaagtgcaaaccacatcgtggaggaagttcgtctgcgtaag

SEQ ID NO: 90 - protein, 326 aa, Artificial Sequence
  Engineered variant of Pantothenate Kinase from Escherichia coli
MHHHHHHGGSGSIKEQTEMTPYLQLDRNQWAAVRDSNPMTLSEDEIARLKGINEDLSLEEVAEVYLPLSRVLNFYISSNLRRQAQLEQFLGTNGQRIPYIISVAGSVAVGKSTFARVLQALLSRWPEHRRVEHITTDGFLLPNQVLKERGLMGKKGFPESYDMHRLMKFVKDLKSGVPNVTAPVYSHLIYDVIPDGDKTVVQPDILILEGLNVLQSGMDYPHDPHHVFVSDFVDFSIYVDAPEDLLQTWYINRFLKLREGAFTDPDSYFHGYAKLTKEEAIKTAMTIWKEMNSVNLKQNILPTRERASLILTKSANHIVEEVRLRK

SEQ ID NO: 91 - DNA, 978 bp, Artificial Sequence
  Engineered variant of Pantothenate Kinase from Escherichia coli
atgcaccatcatcatcatcatggcggtagcggcagcatcaaagagcagaccgagatgaccccgtacctgcaactggaccgtaaccaatgggcggcggtgcgtgatagtaacccgatgaccctgagcgaggacgaaatcgcgcgtctgaagggtattaacgaagatctgagcctggaggaagtggcggaagtctacctgccgctgagccgtgttctgaacttctatattagcagcaacctgcgtcgtcaggcgcagctggaacagtttctgggtaccaatggccagcgtatcccgtatatcattagcattgcgggtagcgtggcggtcggcaaaagcacctttgcgcgtgtgctgcaggcgctgctgagccgttggccggagcatcgtcgtgttgaacatatcagtaccgacggcttcctgcatccgaaccaagtgctgaaggagcgtggtctgatggggaaaaagggtttcccggaaagctacgatatgcaccgtctgatgaaatttgttaaagacctgaagagcggtgtgccgaacgttaccgcgccggtgtacagccacctgatctatgatgttattccggacggcgataaaaccgtggttcagccggacatcctgattctggagggtctgaacgtgctgcaaagcggcatggattatccgcacgatccgcaccacgtgtttgttagcgacttcgtggattttagcatctacgttgacgcgccggaggatctgctgcagacctggtacattaaccgtttcctgaaactgcgtgagggtgcgttcaccgacccggatagctactttcacgggtatgcgaaactgaccaaggaagaggcgatcaaaaccgcgatgaccatttggaaggagatgaacagcgtgaacctgaagcaaaacattctgccgacccgtgagcgtgcgagcctgattttgaccaaaagtgcaaaccacatcgtggaggaagtttgtctgcgtaag

SEQ ID NO: 92 - protein, 326 aa, Artificial Sequence
  Engineered variant of Pantothenate Kinase from Escherichia coli
MHHHHHHGGSGSIKEQTEMTPYLQLDRNQWAAVRDSNPMTLSEDEIARLKGINEDLSLEEVAEVYLPLSRVLNFYISSNLRRQAQLEQFLGTNGQRIPYIISIAGSVAVGKSTFARVLQALLSRWPEHRRVEHISTDGFLHPNQVLKERGLMGKKGFPESYDMHRLMKFVKDLKSGVPNVTAPVYSHLIYDVIPDGDKTVVQPDILILEGLNVLQSGMDYPHDPHHVFVSDFVDFSIYVDAPEDLLQTWYINRFLKLREGAFTDPDSYFHGYAKLTKEEAIKTAMTIWKEMNSVNLKQNILPTRERASLILTKSANHIVEEVCLRK

SEQ ID NO: 93 - DNA, 978 bp, Artificial Sequence
  Engineered variant of Pantothenate Kinase from Escherichia coli
atgcaccatcatcatcatcatggcggtagcggcagcatcaaagagcagaccgagatgaccccgtacctgcaactggaccgtaaccaatgggcggcggtgcgtgatagtaacccgatgaccctgagcgaggacgaaatcgcgcgtctgaagggtattaacgaagatctgagcctggaggaagtggcggaagtctacctgccgctgagccgtgttctgaacttctatattagcagcaacctgcgtcgtcaggcgcagctggaacagtttctgggtaccaatggccagcgtatcccgtatatcattagcattgcgggtagcgtggcggttggcaaaagcacctttgcgcgtgtgctgcaggcgctgctgagccgttggccggagcatcgtcgtgttgaacatatcaccaccgacggcttcctgcacccgaaccaagtgctgaaggagcgtggtctgatggggaaaaagggtttcccggaaagctacgatatgcaccgtctgatgaaatttgttaaagacctgaagagcggtgtgccgaacgttaccgcgccggtgtacagccacctgatctatgatgttattccggacggcgataaaaccgtggttcagccggacatcctgattctggagggtctgaacgtgctgcaaagcggctgtgactatccgcacgatccgcaccacgtgtttgttagcgacttcgtggattttagcatctacgttgacgcgccggaggatctgctgcagacctggtacattaaccgtttcctgaaactgcgtgagggtgcgttcaccgacccggatagctactttcacgggtatgcgaaactgaccaaggaagaggcgatcaaaaccgcgatgaccatttggaaggagatgaacagcgtgaacctgaagcaaaacattctgccgacccgtgaacgtgcgagcctgattctgaccaaaagtgcaaaccacatcgtggaggaagttcgtctgcgtaag

SEQ ID NO: 94 - protein, 326 aa, Artificial Sequence
  Engineered variant of Pantothenate Kinase from Escherichia coli
MHHHHHHGGSGSIKEQTEMTPYLQLDRNQWAAVRDSNPMTLSEDEIARLKGINEDLSLEEVAEVYLPLSRVLNFYISSNLRRQAQLEQFLGTNGQRIPYIISIAGSVAVGKSTFARVLQALLSRWPEHRRVEHITTDGFLHPNQVLKERGLMGKKGFPESYDMHRLMKFVKDLKSGVPNVTAPVYSHLIYDVIPDGDKTVVQPDILILEGLNVLQSGCDYPHDPHHVFVSDFVDFSIYVDAPEDLLQTWYINRFLKLREGAFTDPDSYFHGYAKLTKEEAIKTAMTIWKEMNSVNLKQNILPTRERASLILTKSANHIVEEVRLRK

SEQ ID NO: 95 - DNA, 978 bp, Artificial Sequence
  Engineered variant of Pantothenate Kinase from Escherichia coli
atgcaccatcatcatcatcatggcggtagcggcagcatcaaagagcagaccgagatgaccccgtacctgcaactggaccgtaaccaatgggcggcggtgcgtgatagtaacccgatgaccctgagcgaggacgaaatcgcgcgtctgaagggtattaacgaagatctgagcctggaggaagtggcggaagtctacctgccgctgagccgtgttctgaacttctatattagcagcaacctgcgtcgtcaggcgcagctggaacagtttctgggtaccaatggccagcgtatcccgtatatcattagcattgcgggtagcgtggcggttggcaaaagcacctttgcgcgtgtgctgcaggcgctgctgagccgttggccggagcatcgtcgtgttgaacatatcaccaccgacggcttcctgcatccgaaccaagtgctgaaggagcgtggtctgatggggaaaaagggtttcccggaaagctacgatatgcaccgtctgatgaaatttgttaaagacctgaagagcggtgtgccgaacgttaccgcgccggtgtacagccacctgatctatgatgttgttccggacggcgataaaaccgtggttcagccggacatcctgattctggagggtctgaacgtgctgcaaggcggcatggactatccgcacgatccgcaccacgtgtttgttagcgacttcgtggattttagcatctacgttgacgcgccggaggatctgctgcagacctggtacattaaccgtttcctgaaactgcgtgagggtgcgttcaccgacccggatagctactttcacgggtatgcgaaactgaccaaggaagaggcgatcaaaaccgcgatgaccatttggaaggagatgaacagcgtgaacctgaagcaaaacattctgccgacccgtgaacgtgcgagcctgattttgaccaaaagtgcaaaccacatcgtggaggaagttcgtctgcgtaag

SEQ ID NO: 96 - protein, 326 aa, Artificial Sequence
  Engineered variant of Pantothenate Kinase from Escherichia coli
MHHHHHHGGSGSIKEQTEMTPYLQLDRNQWAAVRDSNPMTLSEDEIARLKGINEDLSLEEVAEVYLPLSRVLNFYISSNLRRQAQLEQFLGTNGQRIPYIISIAGSVAVGKSTFARVLQALLSRWPEHRRVEHITTDGFLHPNQVLKERGLMGKKGFPESYDMHRLMKFVKDLKSGVPNVTAPVYSHLIYDVVPDGDKTVVQPDILILEGLNVLQGGMDYPHDPHHVFVSDFVDFSIYVDAPEDLLQTWYINRFLKLREGAFTDPDSYFHGYAKLTKEEAIKTAMTIWKEMNSVNLKQNILPTRERASLILTKSANHIVEEVRLRK

SEQ ID NO: 97 - DNA, 978 bp, Artificial Sequence
  Engineered variant of Pantothenate Kinase from Escherichia coli
atgcaccatcatcatcatcatggcggtagcggcagcatcaaagagcagaccgagatgaccccgtacctgcaactggaccgtaaccaatgggcggcggtgcgtgatagtaacccgatgaccctgagcgaggacgaaatcgcgcgtctgaagggtattaacgaagatctgagcctggaggaagtggcgcttgtctacctgccgctgagccgtgttctgaacttctatattagcagcaacctgcgtcgtcaggcgcagctggaacagtttctgggtaccaatggccagcgtatcccgtatatcattagcattgcgggtagcgtggcggttggcaaaagcacctttgcgcgtgtgctgcaggcgctgctgagccgttggccggagcatcgtcgtgttgaacatatcaccaccgacggcttcctgcacccgaaccaagtgctgaaggagcgtggtctgatggggaaaaagggtttcccggaaagctacgatatgcaccgtctgatgaaatttgttaaagacctgaagagcggtgtgccgaacgttaccgcgccggtgtacagccacctgatctatgatgttattccggacggcgataaaaccgtggttcagccggacatcctgattctggagggtctgaacgtgctgcaaagcggcatggactatccgcacgatccgcaccacgtgtttgttagcgacttcgtggattttagcatctacgttgacgcgccggaggatctgctgcagacctggtacattaaccgtttcctgaaactgcgtgagggtgcgttcaccgacccggatagctactttcacgggtatgcgaaactgaccaaggaagaggcgatcaaaaccgcgatgaccatttggaaggagatgaacagcgtgaacctgaagcaaaacattctgccgacccgtgaacgtgcgagcctgattctgaccaaaagtgcaaaccacatcgtggaggaagttcgtctgcgtaag

SEQ ID NO: 98 - protein, 326 aa, Artificial Sequence
  Engineered variant of Pantothenate Kinase from Escherichia coli
MHHHHHHGGSGSIKEQTEMTPYLQLDRNQWAAVRDSNPMTLSEDEIARLKGINEDLSLEEVALVYLPLSRVLNFYISSNLRRQAQLEQFLGTNGQRIPYIISIAGSVAVGKSTFARVLQALLSRWPEHRRVEHITTDGFLHPNQVLKERGLMGKKGFPESYDMHRLMKFVKDLKSGVPNVTAPVYSHLIYDVIPDGDKTVVQPDILILEGLNVLQSGMDYPHDPHHVFVSDFVDFSIYVDAPEDLLQTWYINRFLKLREGAFTDPDSYFHGYAKLTKEEAIKTAMTIWKEMNSVNLKQNILPTRERASLILTKSANHIVEEVRLRK

SEQ ID NO: 99 - DNA, 978 bp, Artificial Sequence
  Engineered variant of Pantothenate Kinase from Escherichia coli
atgcaccatcatcatcatcatggcggtagcggcagcatcaaagagcagaccgagatgaccccgtacctgcaactggaccgtaaccaatgggcggcggtgcgtgatagtaacccgatgaccctgagcgaggacgaaatcgcgcgtctgaagggtattaacgaagatctgagcctggaggaagtggcggaagtctacctgccgctgagccgtgttctgaacttctatattagcagcaacctgcgtcgtcaggcgcagctggaacagtttctgggtaccaatggccagcgtatcccgtatatcattagcattgcgggtagcgtggcggttggcaaaagcacctttgcgcgtgtgctgcaggcgctgctgagccgttggccggagcatcgtcgtgttgaacatatcaccaccgacggcttcctgcacccgaaccaagtgctgaaggagcgtggtctgatggggaaaaagggtttcccggaaagctacgatatgcaccgtctgatgaaatttgttaaagacctgaagagcggtgtgccgaacgttaccgcgccggtgtacagccacctgatctatgatgttattccggacggcgataaaaccgtggttcagccggacatcctgattctggagggtctgaacgtgctgcaaagcggcatggactatccgcacgatccgcaccacgtgtttgttagcgacttcgtggattttagcatctacgttgacgcgccggaggatctgctgcagacctggtacattaaccgtttcctgaaactgcgtgagggtgcgttcaccgacccggatagctactttcacgggtatgcggctctgaccaaggaagaggcgatcaaaaccgcgatgaccatttggaaggagatgaacagcgtgaacctgaagcaaaacattctgccgacccgtgaacgtgcgagcctgattctgaccaaaagtgcaaaccacatcgtggaggaagttcgtctgcgtaag

SEQ ID NO: 100 - protein, 326 aa, Artificial Sequence
  Engineered variant of Pantothenate Kinase from Escherichia coli
MHHHHHHGGSGSIKEQTEMTPYLQLDRNQWAAVRDSNPMTLSEDEIARLKGINEDLSLEEVAEVYLPLSRVLNFYISSNLRRQAQLEQFLGTNGQRIPYIISIAGSVAVGKSTFARVLQALLSRWPEHRRVEHITTDGFLHPNQVLKERGLMGKKGFPESYDMHRLMKFVKDLKSGVPNVTAPVYSHLIYDVIPDGDKTVVQPDILILEGLNVLQSGMDYPHDPHHVFVSDFVDFSIYVDAPEDLLQTWYINRFLKLREGAFTDPDSYFHGYAALTKEEAIKTAMTIWKEMNSVNLKQNILPTRERASLILTKSANHIVEEVRLRK

SEQ ID NO: 101 - DNA, 978 bp, Artificial Sequence
  Engineered variant of Pantothenate Kinase from Escherichia coli
atgcaccatcatcatcatcatggcggtagcggcagcatcaaagagcagaccgagatgaccccgtacctgcaactggaccgtaaccaatgggcggcggtgcgtgatagtaacccgatgaccctgagcgaggacgaaatcgcgcgtctgaagggtattaacgaagatctgagcctggaggaagtggcggaagtctacctgccgctgagccgtgttctgaacttctatattagcagcaacctgcgtcgtcaggcgcagctggaacagtttctgggtaccaatggccagcgtatcccgtatatcattagcattgcgggtagcgtggcggtcggcaaaagcacctttgcgcgtgtgctgcaggcgctgctgagccgttggccggagcatcgtcgtgttgaacatatcagtaccgacggcttcctgcatccgaaccaagtgctgaaggagcgtggtctgatggggaaaaagggtttcccggaaagctacgatatgcaccgtctgatgaaatttgttaaagacctgaagagcggtgtgccgaacgttaccgcgccggtgtacagccacctgatctatgatgttattccggacggcgataaaaccgtggttcagccggacatcctgattctggagggtctgaacgtgctgcaaagcggcatggattatccgcacgatccgcaccacgtgtttgttagcgacttcgtggattttagcatctacgttgacgcgccggaggatctgctgcagacctggtacctgaaccgtttcctgaaactgcgtgagggtgcgttcaccgacccggatagctactttcacgggtatgcgaaactgaccaaggaagaggcgatcaaaaccgcgatgaccatttggaaggagatgaacagcgtgaacctgaagcaaaacattctgccgacccgtgagcgtgcgagcctgattttgaccaaaagtgcaaaccacatcgtggaggaagtttgtttgcgtaag

SEQ ID NO: 102 - protein, 326 aa, Artificial Sequence
  Engineered variant of Pantothenate Kinase from Escherichia coli
MHHHHHHGGSGSIKEQTEMTPYLQLDRNQWAAVRDSNPMTLSEDEIARLKGINEDLSLEEVAEVYLPLSRVLNFYISSNLRRQAQLEQFLGTNGQRIPYIISIAGSVAVGKSTFARVLQALLSRWPEHRRVEHISTDGFLHPNQVLKERGLMGKKGFPESYDMHRLMKFVKDLKSGVPNVTAPVYSHLIYDVIPDGDKTVVQPDILILEGLNVLQSGMDYPHDPHHVFVSDFVDFSIYVDAPEDLLQTWYLNRFLKLREGAFTDPDSYFHGYAKLTKEEAIKTAMTIWKEMNSVNLKQNILPTRERASLILTKSANHIVEEVCLRK

SEQ ID NO: 103 - DNA, 978 bp, Artificial Sequence
  Engineered variant of Pantothenate Kinase from Escherichia coli
atgcaccatcatcatcatcatggcggtagcggcagcatcaaagagcagaccgagatgaccccgtacctgcaactggaccgtaaccaatggagggcggtgcgtgatagtaacccgatgaccctgagcgaggacgaaatcgcgcgtctgaagggtattaacgaagatctgagcctggaggaagtggcggaagtctacctgccgctgagccgtgttctgaacttctatattagcagcaacctgcgtcgtcaggcgcagctggaacagtttctgggtaccaatggccagcgtatcccgtatatcattagcattgcgggtagcgtggcggttggcaaaagcacctttgcgcgtgtgctgcaggcgctgctgagccgttggccggagcatcgtcgtgttgaacatatcaccaccgacggcttcctgcacccgaaccaagtgctgaaggagcgtggtctgatggggaaaaagggtttcccggaaagctacgatatgcaccgtctgatgaaatttgttaaagacctgaagagcggtgtgccgaacgttaccgcgccggtgtacagccacctgatctatgatgttattccggacggcgataaaaccgtggttcagccggacatcctgattctggagggtctgaacgtgctgcaaagcggcatggactatccgcacgatccgcaccacgtgtttgttagcgacttcgtggattttagcatctacgttgacgcgccggaggatctgctgcagacctggtacattaaccgtttcctgaaactgcgtgagggtgcgttcaccgacccggatagctactttcacgggtatgcgaaactgaccaaggaagaggcgatcaaaaccgcgatgaccatttggaaggagatgaacagcgtgaacctgaagcaaaacattctgccgacccgtgaacgtgcgagcctgattctgaccaaaagtgcaaaccacatcgtggaggaagttcgtctgcgtaag

SEQ ID NO: 104 - protein, 326 aa, Artificial Sequence
  Engineered variant of Pantothenate Kinase from Escherichia coli
MHHHHHHGGSGSIKEQTEMTPYLQLDRNQWRAVRDSNPMTLSEDEIARLKGINEDLSLEEVAEVYLPLSRVLNFYISSNLRRQAQLEQFLGTNGQRIPYIISIAGSVAVGKSTFARVLQALLSRWPEHRRVEHITTDGFLHPNQVLKERGLMGKKGFPESYDMHRLMKFVKDLKSGVPNVTAPVYSHLIYDVIPDGDKTVVQPDILILEGLNVLQSGMDYPHDPHHVFVSDFVDFSIYVDAPEDLLQTWYINRFLKLREGAFTDPDSYFHGYAKLTKEEAIKTAMTIWKEMNSVNLKQNILPTRERASLILTKSANHIVEEVRLRK

SEQ ID NO: 105 - DNA, 978 bp, Artificial Sequence
  Engineered variant of Pantothenate Kinase from Escherichia coli
atgcaccatcatcatcatcatggcggtagcggcagcatcaaagagcagaccgagatgaccccgtacctgcaactggaccgtaaccaatgggcggcggtgcgtgatagtaacccgatgaccctgagcgaggacgaaatcgcgcgtctgaagggtattaacgaagatctgagcctggaggaagtggcggaagtctacctgccgctgagccgtgttctgaacttctatattagcagcaacctgcgtcgtcaggcgcagctggaacagtttctgggtaccaatggccagcgtatcccgtatatcattagcattgcgggtagcgtggcggttggcaaaagcacctttgcgcgtgtgctgcaggcgctgctgagccgttggccggagcatcgtcgtgttgaacatatcaccaccgacggcttcctgcacccgaaccaagtgctgaaggagcgtggtctgatggggaaaaagggtttcccggaaagctacgatatgcaccgtctgatgaaatttgttaaagacctgaagagcggtgtgccgaacgttaccgcgccggtgtacagccacctgatctatgatgttattccggacggcggtaaaaccgtggttcagccggacatcctgattctggagggtctgaacgtgctgcaaagcggcatggactatccgcacgatccgcaccacgtgtttgttagcgacttcgtggattttagcatctacgttgacgcgccggaggatctgctgcagacctggtacattaaccgtttcctgaaactgcgtgagggtgcgttcaccgacccggatagctactttcacgggtatgcgaaactgaccaaggaagaggcgatcaaaaccgcgatgaccatttggaaggagatgaacagcgtgaacctgaagcaaaacattctgccgacccgtgaacgtgcgagcctgattctgaccaaaagtgcaaaccacatcgtggaggaagttcgtctgcgtaag

SEQ ID NO: 106 - protein, 326 aa, Artificial Sequence
  Engineered variant of Pantothenate Kinase from Escherichia coli
MHHHHHHGGSGSIKEQTEMTPYLQLDRNQWAAVRDSNPMTLSEDEIARLKGINEDLSLEEVAEVYLPLSRVLNFYISSNLRRQAQLEQFLGTNGQRIPYIISIAGSVAVGKSTFARVLQALLSRWPEHRRVEHITTDGFLHPNQVLKERGLMGKKGFPESYDMHRLMKFVKDLKSGVPNVTAPVYSHLIYDVIPDGGKTVVQPDILILEGLNVLQSGMDYPHDPHHVFVSDFVDFSIYVDAPEDLLQTWYINRFLKLREGAFTDPDSYFHGYAKLTKEEAIKTAMTIWKEMNSVNLKQNILPTRERASLILTKSANHIVEEVRLRK

SEQ ID NO: 107 - DNA, 978 bp, Artificial Sequence
  Engineered variant of Pantothenate Kinase from Escherichia coli
atgcaccatcatcatcatcatggcggtagcggcagcatcaaagagcagaccgagatgaccccgtacctgcaactggaccgtaaccaatgggcggcggtgcgtgatagtaacccgatgaccctgagcgaggacgaaatcgcgcgtctgaagggtattaacgaagatctgagcctggaggaagtggcggaagtctacctgccgctgagccgtgttctgaacttctatattagcagcaacctgcgtcgtcaggcgcagctggaacagtttctgggtaccaatggccagcgtatcccgtatatcattagcattgcgggtagcgtggcggtcggcaaaagcacctttgcgcgtgtgctgcaggcgctgctgagccgttggccggagcatcgtcgtgttgaacatatcagtaccgacggcttcctgctgccgaaccaagtgctgaaggagcgtggtctgatggggaaaaagggtttcccggaaagctacgatatgcaccgtctgatgaaatttgttaaagacctgaagagcggtgtgccgaacgttaccgcgccggtgtacagccacctgatctatgatgttattccggacggcgataaaaccgtggttcagccggacatcctgattctggagggtctgaacgtgctgcaaagcggcatggattatccgcacgatccgcaccacgtgtttgttagcgacttcgtggattttagcatctacgttgacgcgccggaggatctgctgcagacctggtacattaaccgtttcctgaaactgcgtgagggtgcgttcaccgacccggatagctactttcacgggtatgcgaaactgaccaaggaagaggcgatcaaaaccgcgatgaccatttggaaggagatgaacagtgtgaacctgaaggcaaacattctgccgacccgtgagcgtgcgagcctgattttgaccaaaagtgcaaaccacatcgtggaggaagtttgtttgcgtaag

SEQ ID NO: 108 - protein, 326 aa, Artificial Sequence
  Engineered variant of Pantothenate Kinase from Escherichia coli
MHHHHHHGGSGSIKEQTEMTPYLQLDRNQWAAVRDSNPMTLSEDEIARLKGINEDLSLEEVAEVYLPLSRVLNFYISSNLRRQAQLEQFLGTNGQRIPYIISIAGSVAVGKSTFARVLQALLSRWPEHRRVEHISTDGFLLPNQVLKERGLMGKKGFPESYDMHRLMKFVKDLKSGVPNVTAPVYSHLIYDVIPDGDKTVVQPDILILEGLNVLQSGMDYPHDPHHVFVSDFVDFSIYVDAPEDLLQTWYINRFLKLREGAFTDPDSYFHGYAKLTKEEAIKTAMTIWKEMNSVNLKANILPTRERASLILTKSANHIVEEVCLRK

SEQ ID NO: 109 - DNA, 978 bp, Artificial Sequence
  Engineered variant of Pantothenate Kinase from Escherichia coli
atgcaccatcatcatcatcatggcggtagcggcagcatcaaagagcagaccgagatgaccccgtacctgcaactggaccgtaaccaatgggcggcggtgcgtgatagtaacccgatgaccctgagcgaggacgaaatcgcgcgtctgaagggtattaacgaagatctgagcctggaggaagtggcggaagtctacctgccgctgagccgtgttctgaacttctatattagcagcaacctgcgtactcaggcgcagctggaacagtttctgggtaccaatggccagcgtatcccgtatatcattagcattgcgggtagcgtggcggttggcaaaagcacctttgcgcgtgtgctgcaggcgctgctgagccgttggccggagcatcgtcgtgttgaacatatcaccaccgacggcttcctgcacccgaaccaagtgctgaaggagcgtggtctgatggggaaaaagggtttcccggaaagctacgatatgcaccgtctgatgaaatttgttaaagacctgaagagcggtgtgccgaacgttaccgcgccggtgtacagccacctgatctatgatgttattccggacggcgataaaaccgtggttcagccggacatcctgattctggagggtctgaacgtgctgcaaagcggcatggactatccgcacgatccgcaccacgtgtttgttagcgacttcgtggattttagcatctacgttgacgcgccggaggatctgctgcagacctggtacattaaccgtttcctgaaactgcgtgagggtgcgttcaccgacccggatagctactttcacgggtatgcgaaactgaccaaggaagaggcgatcaaaaccgcgatgaccatttggaaggagatgaacagcgtgaacctgaagcaaaacattctgccgacccgtgaacgtgcgagcctgattctgaccaaaagtgcaaaccacatcgtggaggaagttcgtctgcgtaag

SEQ ID NO: 110 - protein, 326 aa, Artificial Sequence
  Engineered variant of Pantothenate Kinase from Escherichia coli
MHHHHHHGGSGSIKEQTEMTPYLQLDRNQWAAVRDSNPMTLSEDEIARLKGINEDLSLEEVAEVYLPLSRVLNFYISSNLRTQAQLEQFLGTNGQRIPYIISIAGSVAVGKSTFARVLQALLSRWPEHRRVEHITTDGFLHPNQVLKERGLMGKKGFPESYDMHRLMKFVKDLKSGVPNVTAPVYSHLIYDVIPDGDKTVVQPDILILEGLNVLQSGMDYPHDPHHVFVSDFVDFSIYVDAPEDLLQTWYINRFLKLREGAFTDPDSYFHGYAKLTKEEAIKTAMTIWKEMNSVNLKQNILPTRERASLILTKSANHIVEEVRLRK

SEQ ID NO: 111 - DNA, 978 bp, Artificial Sequence
  Engineered variant of Pantothenate Kinase from Escherichia coli
atgcaccatcatcatcatcatggcggtagcggcagcatcaaagagcagaccgagatgaccccgtacctgcaactggaccgtaaccaatgggcggcggtgcgtgatagtaacccgatgaccctgagcgaggacgaaatcgcgcgtctgaagggtattaacgaagatctgagcctggaggaagtggcggaagtctacctgccgctgagccgtgttctgaacttctatattagcagcaacctgcgtcgtcaggcgcagctggaacagtttctgggtaccaatggccagcgtatcccgtatatcattagcattgcgggtagcgtggcggttggcaaaagcacctttgcgcgtgtgctgcaggcgctgctgagccgttggccggagcatcgtcgtgttgaacatatcaccaccgacggcttcctgcacccgaaccaagtgctgaaggagcgtggtctgatggggaaaaagggtttcccggaaagctacgatatgcaccgtctgatgaaatttgttaaagacctgaagagcggtgtgccgaacgttaccgcgccggtgtacagccacctgatctatgatgttattccggacggcgataaaaccgtggttcagccggacatcctgattctggagggtctgaacgtgctgcaaagcggcatggactatccgcacgatccgcaccacgtgtttgttagcgacttcgtggattttagcatctacgttgacgcgccggaggatctgctgcagacctggtacattaaccgtttcctgaaactgcgtgagggtgcgttcaccgacccggatagctactttcacgggtatgcgaaactgaccaaggaagaggcgatcaaaaccgcgatggatatttggaaggagatgaacagcgtgaacctgaagcaaaacattctgccgacccgtgaacgtgcgagcctgattctgaccaaaagtgcaaaccacatcgtggaggaagttcgtctgcgtaag

SEQ ID NO: 112 - protein, 326 aa, Artificial Sequence
  Engineered variant of Pantothenate Kinase from Escherichia coli
MHHHHHHGGSGSIKEQTEMTPYLQLDRNQWAAVRDSNPMTLSEDEIARLKGINEDLSLEEVAEVYLPLSRVLNFYISSNLRRQAQLEQFLGTNGQRIPYIISIAGSVAVGKSTFARVLQALLSRWPEHRRVEHITTDGFLHPNQVLKERGLMGKKGFPESYDMHRLMKFVKDLKSGVPNVTAPVYSHLIYDVIPDGDKTVVQPDILILEGLNVLQSGMDYPHDPHHVFVSDFVDFSIYVDAPEDLLQTWYINRFLKLREGAFTDPDSYFHGYAKLTKEEAIKTAMDIWKEMNSVNLKQNILPTRERASLILTKSANHIVEEVRLRK

SEQ ID NO: 113 - DNA, 978 bp, Artificial Sequence
  Engineered variant of Pantothenate Kinase from Escherichia coli
atgcaccatcatcatcatcatggcggtagcggcagcatcaaagagcagaccgagatgaccccgtacctgcaactggaccgtaaccaatgggcggcggtgcgtgatagttttccgatgaccctgagcgaggacgaaatcgcgcgtctgaagggtattaacgaagatctgagcctggaggaagtggcggaagtctacctgccgctgagccgtgttctgaacttctatattagcagcaacctgcgtcgtcaggcgcagctggaacagtttctgggtaccaatggccagcgtatcccgtatatcattagcattgcgggtagcgtggcggttggcaaaagcacctttgcgcgtgtgctgcaggcgctgctgagccgttggccggagcatcgtcgtgttgaacatatcaccaccgacggcttcctgcacccgaaccaagtgctgaaggagcgtggtctgatggggaaaaagggtttcccggaaagctacgatatgcaccgtctgatgaaatttgttaaagacctgaagagcggtgtgccgaacgttaccgcgccggtgtacagccacctgatctatgatgttattccggacggcgataaaaccgtggttcagccggacatcctgattctggagggtctgaacgtgctgcaaagcggcatggactatccgcacgatccgcaccacgtgtttgttagcgacttcgtggattttagcatctacgttgacgcgccggaggatctgctgcagacctggtacattaaccgtttcctgaaactgcgtgagggtgcgttcaccgacccggatagctactttcacgggtatgcgaaactgaccaaggaagaggcgatcaaaaccgcgatgaccatttggaaggagatgaacagcgtgaacctgaagcaaaacattctgccgacccgtgaacgtgcgagcctgattctgaccaaaagtgcaaaccacatcgtggaggaagttcgtctgcgtaag

SEQ ID NO: 114 - protein, 326 aa, Artificial Sequence
  Engineered variant of Pantothenate Kinase from Escherichia coli
MHHHHHHGGSGSIKEQTEMTPYLQLDRNQWAAVRDSFPMTLSEDEIARLKGINEDLSLEEVAEVYLPLSRVLNFYISSNLRRQAQLEQFLGTNGQRIPYIISIAGSVAVGKSTFARVLQALLSRWPEHRRVEHITTDGFLHPNQVLKERGLMGKKGFPESYDMHRLMKFVKDLKSGVPNVTAPVYSHLIYDVIPDGDKTVVQPDILILEGLNVLQSGMDYPHDPHHVFVSDFVDFSIYVDAPEDLLQTWYINRFLKLREGAFTDPDSYFHGYAKLTKEEAIKTAMTIWKEMNSVNLKQNILPTRERASLILTKSANHIVEEVRLRK

SEQ ID NO: 115 - DNA, 978 bp, Artificial Sequence
  Engineered variant of Pantothenate Kinase from Escherichia coli
atgcaccatcatcatcatcatggcggtagcggcagcatcaaagagcagaccgagatgaccccgtacctgcaactggaccgtaaccaatgggcggcggtgcgtgatagtaacccgatgaccctgagcgaggacgaaatcgcgcgtctgaagggtattaacgaagatctgagcctggaggaagtggcggaagtctacctgccgctgagccgtgttctgaacttctatattcttagcaacctgcgtcgtcaggcgcagctggaacagtttctgggtaccaatggccagcgtatcccgtatatcattagcattgcgggtagcgtggcggttggcaaaagcacctttgcgcgtgtgctgcaggcgctgctgagccgttggccggagcatcgtcgtgttgaacatatcaccaccgacggcttcctgcacccgaaccaagtgctgaaggagcgtggtctgatggggaaaaagggtttcccggaaagctacgatatgcaccgtctgatgaaatttgttaaagacctgaagagcggtgtgccgaacgttaccgcgccggtgtacagccacctgatctatgatgttattccggacggcgataaaaccgtggttcagccggacatcctgattctggagggtctgaacgtgctgcaaagcggcatggactatccgcacgatccgcaccacgtgtttgttagcgacttcgtggattttagcatctacgttgacgcgccggaggatctgctgcagacctggtacattaaccgtttcctgaaactgcgtgagggtgcgttcaccgacccggatagctactttcacgggtatgcgaaactgaccaaggaagaggcgatcaaaaccgcgatgaccatttggaaggagatgaacagcgtgaacctgaagcaaaacattctgccgacccgtgaacgtgcgagcctgattctgaccaaaagtgcaaaccacatcgtggaggaagttcgtctgcgtaag

SEQ ID NO: 116 - protein, 326 aa, Artificial Sequence
  Engineered variant of Pantothenate Kinase from Escherichia coli
MHHHHHHGGSGSIKEQTEMTPYLQLDRNQWAAVRDSNPMTLSEDEIARLKGINEDLSLEEVAEVYLPLSRVLNFYILSNLRRQAQLEQFLGTNGQRIPYIISIAGSVAVGKSTFARVLQALLSRWPEHRRVEHITTDGFLHPNQVLKERGLMGKKGFPESYDMHRLMKFVKDLKSGVPNVTAPVYSHLIYDVIPDGDKTVVQPDILILEGLNVLQSGMDYPHDPHHVFVSDFVDFSIYVDAPEDLLQTWYINRFLKLREGAFTDPDSYFHGYAKLTKEEAIKTAMTIWKEMNSVNLKQNILPTRERASLILTKSANHIVEEVRLRK

SEQ ID NO: 117 - DNA, 978 bp, Artificial Sequence
  Engineered variant of Pantothenate Kinase from Escherichia coli
atgcaccatcatcatcatcatggcggtagcggcagcatcaaagagcagaccgagatgaccccgtacctgcaactggaccgtaaccaatgggcggcggtgcgtgatagtaacccgatgaccctgagcgaggacgaaatcgcgcgtctgaagggtattaacgaagatctgagcctggaggaagtggcggaagtctacctgccgctgagccgtgttctgggtttctatattagcagcaacctgcgtcgtcaggcgcagctggaacagtttctgggtaccaatggccagcgtatcccgtatatcattagcattgcgggtagcgtggcggttggcaaaagcacctttgcgcgtgtgctgcaggcgctgctgagccgttggccggagcatcgtcgtgttgaacatatcaccaccgacggcttcctgcacccgaaccaagtgctgaaggagcgtggtctgatggggaaaaagggtttcccggaaagctacgatatgcaccgtctgatgaaatttgttaaagacctgaagagcggtgtgccgaacgttaccgcgccggtgtacagccacctgatctatgatgttattccggacggcgataaaaccgtggttcagccggacatcctgattctggagggtctgaacgtgctgcaaagcggcatggactatccgcacgatccgcaccacgtgtttgttagcgacttcgtggattttagcatctacgttgacgcgccggaggatctgctgcagacctggtacattaaccgtttcctgaaactgcgtgagggtgcgttcaccgacccggatagctactttcacgggtatgcgaaactgaccaaggaagaggcgatcaaaaccgcgatgaccatttggaaggagatgaacagcgtgaacctgaagcaaaacattctgccgacccgtgaacgtgcgagcctgattctgaccaaaagtgcaaaccacatcgtggaggaagttcgtctgcgtaag

SEQ ID NO: 118 - protein, 326 aa, Artificial Sequence
  Engineered variant of Pantothenate Kinase from Escherichia coli
MHHHHHHGGSGSIKEQTEMTPYLQLDRNQWAAVRDSNPMTLSEDEIARLKGINEDLSLEEVAEVYLPLSRVLGFYISSNLRRQAQLEQFLGTNGQRIPYIISIAGSVAVGKSTFARVLQALLSRWPEHRRVEHITTDGFLHPNQVLKERGLMGKKGFPESYDMHRLMKFVKDLKSGVPNVTAPVYSHLIYDVIPDGDKTVVQPDILILEGLNVLQSGMDYPHDPHHVFVSDFVDFSIYVDAPEDLLQTWYINRFLKLREGAFTDPDSYFHGYAKLTKEEAIKTAMTIWKEMNSVNLKQNILPTRERASLILTKSANHIVEEVRLRK

SEQ ID NO: 119 - DNA, 978 bp, Artificial Sequence
  Engineered variant of Pantothenate Kinase from Escherichia coli
atgcaccatcatcatcatcatggcggtagcggcagcatcaaagagcagaccgagatgaccccgtacctgcaactggaccgtaaccaatgggcggcggtgcgtgatagtaacccgatgaccctgagcgaggacgaaatcgcgcgtctgaagggtattaacgaagatctgagcctggaggaagtggcggaagtctacctgccgctgagccgtgttctgaacttctatattagcagcaacctgcgtcgtcaggcgcagctggaacagtttctgggtaccaatggccagcgtatcccgtatatcattagcattgcgggtagcgtggcggtcggcaaaagcacctttgcgcgtgtgctgcaggcgctgctgagccgttggccggagcatcgtcgtgttgaacatatcagtaccgacggcttcctgcatccgaaccaagtgctgaaggagcgtggtctgatggggaaaaagggtttcccggaaagctacgatatgcaccgtctgatgaaatttgttaaagacctgaagagcggtgtgccgaacgttaccgcgccggtgtacagccacctgatctatgatgttattccggacggcgataaaaccgtggttcagccggacatcctgattctggagggtctgaacgtgctgcaaagcggcatgggttatccgcacgatccgcaccacgtgtttgttagcgacttcgtggattttagcatctacgttgacgcgccggaggatctgctgcagacctggtacattaaccgtttcctgaaactgcgtgagggtgcgttcaccgacccggatagctactttcacgggtatgcgaaactgaccaaggaagaggcgatcaaaaccgcgatgaccatttggaaggagatgaacagcgtgaacctgaagcaaaacattctgccgacccgtgagcgtgcgagcctgattttgaccaaaagtgcaaaccacatcgtggaggaagttcgtctgcgtaag

SEQ ID NO: 120 - protein, 326 aa, Artificial Sequence
  Engineered variant of Pantothenate Kinase from Escherichia coli
MHHHHHHGGSGSIKEQTEMTPYLQLDRNQWAAVRDSNPMTLSEDEIARLKGINEDLSLEEVAEVYLPLSRVLNFYISSNLRRQAQLEQFLGTNGQRIPYIISIAGSVAVGKSTFARVLQALLSRWPEHRRVEHISTDGFLHPNQVLKERGLMGKKGFPESYDMHRLMKFVKDLKSGVPNVTAPVYSHLIYDVIPDGDKTVVQPDILILEGLNVLQSGMGYPHDPHHVFVSDFVDFSIYVDAPEDLLQTWYINRFLKLREGAFTDPDSYFHGYAKLTKEEAIKTAMTIWKEMNSVNLKQNILPTRERASLILTKSANHIVEEVRLRK

SEQ ID NO: 121 - DNA, 978 bp, Artificial Sequence
  Engineered variant of Pantothenate Kinase from Escherichia coli
atgcaccatcatcatcatcatggcggtagcggcagcatcaaagagcagaccgagatgaccccgtacctgcaactggaccgtaaccaatgggcggcggtgcgtgatagtaacccgatgaccctgagcgaggacgaaatcgcgcgtctgaagggtattaacgaagatctgagcctggaggaagtggcggaagtctacctgccgctgagccgtgttctgaacttctatattagcagcaacctgcgtcgtcaggcgcagctggaacagtttctgggtaccaatggccagcgtatcccgtatatcattagcattgcgggtagcgtggcggttggcaaaagcacctttgcgcgtgtgctgcaggcgctgctgagccgttggccggagcatcgtcgtgttgaacatatcaccaccgacggcttcctgctgccgaaccaagtgctgaaggagcgtggtctgatggggaaaaagggtttcccggaaagctacgatatgcaccgtctgatgaaatttgttaaagacctgaagagcggtgtgccgaacgttaccgcgccggtgtacagccacctgatctatgatgttattccggacggcgataaaaccgtggttcagccggacatcctgattctggagggtctgaacgtgctgcaaagcggcatggactatccgcacgatccgcaccacgtgtttgttagcgacttcgtggattttagcatctacgttgacgcgccggaggatctgctgcagacctggtacattaaccgtttcctgaaactgcgtgagggtgcgttcaccgacccggatagctactttcacgggtatgcgaaactgaccaaggaagaggcgatcaaaaccgcgatgaccatttggaaggagatgaacagcgtgaacctggtacaaaacattctgccgacccgtgaacgtgcgagcctgattttgaccaaaagtgcaaaccacatcgtggaggaagttcgtctgcgtaag

SEQ ID NO: 122 - protein, 326 aa, Artificial Sequence
  Engineered variant of Pantothenate Kinase from Escherichia coli
MHHHHHHGGSGSIKEQTEMTPYLQLDRNQWAAVRDSNPMTLSEDEIARLKGINEDLSLEEVAEVYLPLSRVLNFYISSNLRRQAQLEQFLGTNGQRIPYIISIAGSVAVGKSTFARVLQALLSRWPEHRRVEHITTDGFLLPNQVLKERGLMGKKGFPESYDMHRLMKFVKDLKSGVPNVTAPVYSHLIYDVIPDGDKTVVQPDILILEGLNVLQSGMDYPHDPHHVFVSDFVDFSIYVDAPEDLLQTWYINRFLKLREGAFTDPDSYFHGYAKLTKEEAIKTAMTIWKEMNSVNLVQNILPTRERASLILTKSANHIVEEVRLRK

SEQ ID NO: 123 - DNA, 978 bp, Artificial Sequence
  Engineered variant of Pantothenate Kinase from Escherichia coli
atgcaccatcatcatcatcatggcggtagcggcagcatcaaagagcagaccgagatgaccccgtacctgcaactggaccgtaaccaatgggcggcggtgcgtgatagtaacccgatgaccctgagcgaggacgaaatcgcgcgtctgaagggtattaacgaagatctgagcctggaggaagtggcggaagtctacctgccgctgagccgtgttctgaacttctatattagcagcaacctgcgtcgtcaggcgcagctggaacagtttctgggtaccaatggccagcgtatcccgtatatcattagcattgcgggtagcgtggcggttggcaaaagcacctttgcgcgtgtgctgcaggcgctgctgagccgttggccggagcatcgtcgtgttgaacatatcaccaccgacggcttcctgcacccgaaccaagtgctgaaggagcgtggtctgatggggaaaaagggtttcccggaaagctacgatatgcaccgtctgatgaaatttgttaaagacctgaagagcggtgtgccgaacgttaccgcgccggtgtacagccacctgatctatgatgttattccgggtggcgataaaaccgtggttcagccggacatcctgattctggagggtctgaacgtgctgcaaagcggcatggactatccgcacgatccgcaccacgtgtttgttagcgacttcgtggattttagcatctacgttgacgcgccggaggatctgctgcagacctggtacattaaccgtttcctgaaactgcgtgagggtgcgttcaccgacccggatagctactttcacgggtatgcgaaactgaccaaggaagaggcgatcaaaaccgcgatgaccatttggaaggagatgaacagcgtgaacctgaagcaaaacattctgccgacccgtgaacgtgcgagcctgattctgaccaaaagtgcaaaccacatcgtggaggaagttcgtctgcgtaag

SEQ ID NO: 124 - protein, 326 aa, Artificial Sequence
  Engineered variant of Pantothenate Kinase from Escherichia coli
MHHHHHHGGSGSIKEQTEMTPYLQLDRNQWAAVRDSNPMTLSEDEIARLKGINEDLSLEEVAEVYLPLSRVLNFYISSNLRRQAQLEQFLGTNGQRIPYIISIAGSVAVGKSTFARVLQALLSRWPEHRRVEHITTDGFLHPNQVLKERGLMGKKGFPESYDMHRLMKFVKDLKSGVPNVTAPVYSHLIYDVIPGGDKTVVQPDILILEGLNVLQSGMDYPHDPHHVFVSDFVDFSIYVDAPEDLLQTWYINRFLKLREGAFTDPDSYFHGYAKLTKEEAIKTAMTIWKEMNSVNLKQNILPTRERASLILTKSANHIVEEVRLRK

SEQ ID NO: 125 - DNA, 978 bp, Artificial Sequence
  Engineered variant of Pantothenate Kinase from Escherichia coli
atgcaccatcatcatcatcatggcggtagcggcagcatcaaagagcagaccgagatgaccccgtacctgcaactggaccgtaaccaatgggcggcggtgcgtgatagtaacccgatgaccctgagcgagtgggaaatcgcgcgtctgaagggtattaacgaagatctgagcctggaggaagtggcggaagtctacctgccgctgagccgtgttctgaacttctatattagcagcaacctgcgtcgtcaggcgcagctggaacagtttctgggtaccaatggccagcgtatcccgtatatcattagcattgcgggtagcgtggcggttggcaaaagcacctttgcgcgtgtgctgcaggcgctgctgagccgttggccggagcatcgtcgtgttgaacatatcaccaccgacggcttcctgcacccgaaccaagtgctgaaggagcgtggtctgatggggaaaaagggtttcccggaaagctacgatatgcaccgtctgatgaaatttgttaaagacctgaagagcggtgtgccgaacgttaccgcgccggtgtacagccacctgatctatgatgttattccggacggcgataaaaccgtggttcagccggacatcctgattctggagggtctgaacgtgctgcaaagcggcatggactatccgcacgatccgcaccacgtgtttgttagcgacttcgtggattttagcatctacgttgacgcgccggaggatctgctgcagacctggtacattaaccgtttcctgaaactgcgtgagggtgcgttcaccgacccggatagctactttcacgggtatgcgaaactgaccaaggaagaggcgatcaaaaccgcgatgaccatttggaaggagatgaacagcgtgaacctgaagcaaaacattctgccgacccgtgaacgtgcgagcctgattctgaccaaaagtgcaaaccacatcgtggaggaagttcgtctgcgtaag

SEQ ID NO: 126 - protein, 326 aa, Artificial Sequence
  Engineered variant of Pantothenate Kinase from Escherichia coli
MHHHHHHGGSGSIKEQTEMTPYLQLDRNQWAAVRDSNPMTLSEWEIARLKGINEDLSLEEVAEVYLPLSRVLNFYISSNLRRQAQLEQFLGTNGQRIPYIISIAGSVAVGKSTFARVLQALLSRWPEHRRVEHITTDGFLHPNQVLKERGLMGKKGFPESYDMHRLMKFVKDLKSGVPNVTAPVYSHLIYDVIPDGDKTVVQPDILILEGLNVLQSGMDYPHDPHHVFVSDFVDFSIYVDAPEDLLQTWYINRFLKLREGAFTDPDSYFHGYAKLTKEEAIKTAMTIWKEMNSVNLKQNILPTRERASLILTKSANHIVEEVRLRK

SEQ ID NO: 127 - DNA, 978 bp, Artificial Sequence
  Engineered variant of Pantothenate Kinase from Escherichia coli
atgcaccatcatcatcatcatggcggtagcggcagcatcaaagagcagaccgagatgaccccgtacctgcaactggaccgtaaccaatgggcggcggtgcgtgatagtaacccgatgaccctgagcgaggacgaaatcgcgcgtctgaagggtattaacgaagatctgagcctggaggaagtggcggaagtctacctgccgctgagccgtgttctgaacttctatattagcagcaacctgcgtcgtcaggcgcagctggaacagtttctgggtaccaatggccagcgtatcccgtatatcattagcattgcgggtagcgtggcggttggcaaaagcacctttgcgcgtgtgctgcaggcgctgctgagccgttggccggagcatcgtcgtgttgaacatatcaccaccgacggcttcctgcacccgaaccaagtgctgaaggagcgtggtctgatggggaaaaagggtttcccggaaagctacgatatgcaccgtctgatgaaatttgttaaagacctgaagagcggtgtgccgaacgttaccgcgccggtgtacagccacctgatctatgatgttattccggacggcgataaaaccgtggttcagccggacatcctgattctggagggtctgaacgtgctgcaaagcggcatggactatccgcacgatccgcaccacgtgtttgttagcgacttcgtggattttagcatctacgttgacgcgccggaggatctgctgcagacctggtacattaaccgtttcctgaaactgcgtgagggtgcgttcaccgacccggatagctactttcacgggtatgcgaaactgaccaaggaagaggcgatcaaaaccgcgatgaccatttggaaggaggggaacagcgtgaacctgaagcaaaacattctgccgacccgtgaacgtgcgagcctgattctgaccaaaagtgcaaaccacatcgtggaggaagttcgtctgcgtaag

SEQ ID NO: 128 - protein, 326 aa, Artificial Sequence
  Engineered variant of Pantothenate Kinase from Escherichia coli
MHHHHHHGGSGSIKEQTEMTPYLQLDRNQWAAVRDSNPMTLSEDEIARLKGINEDLSLEEVAEVYLPLSRVLNFYISSNLRRQAQLEQFLGTNGQRIPYIISIAGSVAVGKSTFARVLQALLSRWPEHRRVEHITTDGFLHPNQVLKERGLMGKKGFPESYDMHRLMKFVKDLKSGVPNVTAPVYSHLIYDVIPDGDKTVVQPDILILEGLNVLQSGMDYPHDPHHVFVSDFVDFSIYVDAPEDLLQTWYINRFLKLREGAFTDPDSYFHGYAKLTKEEAIKTAMTIWKEGNSVNLKQNILPTRERASLILTKSANHIVEEVRLRK

SEQ ID NO: 129 - DNA, 978 bp, Artificial Sequence
  Engineered variant of Pantothenate Kinase from Escherichia coli
atgcaccatcatcatcatcatggcggtagcggcagcatcaaagagcagaccgagatgaccccgtacctgcaactggaccgtaaccaatgggcggcggtgcgtgatagtaacccgatgaccctgagcgaggacgaaatcgcgcgtctgaagggtattaacgaagatctgagcctggaggaagtggcggaagtctacctgccgctgagccgtgttctgaacttctatattagcagcaacctgcgtcgtcaggcgcagctggaacagtttctgggtaccaatggccagcgtatcccgtatatcattagcattgcgggtagcgtggcggttggcaaaagcacctttgcgcgtgtgctgcaggcgctgctgagccgttggccggagcatcgtcgtgttgaacatatcaccaccgacggcttcctgcacccgaaccaagtgctgaaggagcgtggtctgatggggaaaaagggtttcccggaaagctacgatatgcaccgtctgatgaaatttgttaaagacctgaagagcggtgtgccgaacgttaccgcgccggtgtacagccacctgatctatgatgttattccggacggcgataaaaccgtggttcagccggacatcctgattctggagggtctgaacgtgctgcaaagcggcatggactatgagcacgatccgcaccacgtgtttgttagcgacttcgtggattttagcatctacgttgacgcgccggaggatctgctgcagacctggtacattaaccgtttcctgaaactgcgtgagggtgcgttcaccgacccggatagctactttcacgggtatgcgaaactgaccaaggaagaggcgatcaaaaccgcgatgaccatttggaaggagatgaacagcgtgaacctgaagcaaaacattctgccgacccgtgaacgtgcgagcctgattctgaccaaaagtgcaaaccacatcgtggaggaagttcgtctgcgtaag

SEQ ID NO: 130 - protein, 326 aa, Artificial Sequence
  Engineered variant of Pantothenate Kinase from Escherichia coli
MHHHHHHGGSGSIKEQTEMTPYLQLDRNQWAAVRDSNPMTLSEDEIARLKGINEDLSLEEVAEVYLPLSRVLNFYISSNLRRQAQLEQFLGTNGQRIPYIISIAGSVAVGKSTFARVLQALLSRWPEHRRVEHITTDGFLHPNQVLKERGLMGKKGFPESYDMHRLMKFVKDLKSGVPNVTAPVYSHLIYDVIPDGDKTVVQPDILILEGLNVLQSGMDYEHDPHHVFVSDFVDFSIYVDAPEDLLQTWYINRFLKLREGAFTDPDSYFHGYAKLTKEEAIKTAMTIWKEMNSVNLKQNILPTRERASLILTKSANHIVEEVRLRK

SEQ ID NO: 131 - DNA, 978 bp, Artificial Sequence
  Engineered variant of Pantothenate Kinase from Escherichia coli
atgcaccatcatcatcatcatggcggtagcggcagcatcaaagagcagaccgagatgaccccgtacctgcaactggaccgtaaccaatgggcggcggtgcgtgatagtaacccgatgaccctgagcgaggacgaaatcgcgcgtctgaagggtattaacgaagatctgagcctggaggaagtggcggaagtctacctgccgctgagccgtgttctgaacttctatattagcagcaacctgcgtcgtcaggcgcagctggaacagtttctgggtaccaatggccagcgtatcccgtatatcattagcattgcgggtagcgtggcggttggcaaaagcacctttgcgcgtgtgctgcaggcgctgctgagccgttggccggagcatcgttatgttgaacatatcaccaccgacggcttcctgcacccgaaccaagtgctgaaggagcgtggtctgatggggaaaaagggtttcccggaaagctacgatatgcaccgtctgatgaaatttgttaaagacctgaagagcggtgtgccgaacgttaccgcgccggtgtacagccacctgatctatgatgttattccggacggcgataaaaccgtggttcagccggacatcctgattctggagggtctgaacgtgctgcaaagcggcatggactatccgcacgatccgcaccacgtgtttgttagcgacttcgtggattttagcatctacgttgacgcgccggaggatctgctgcagacctggtacattaaccgtttcctgaaactgcgtgagggtgcgttcaccgacccggatagctactttcacgggtatgcgaaactgaccaaggaagaggcgatcaaaaccgcgatgaccatttggaaggagatgaacagcgtgaacctgaagcaaaacattctgccgacccgtgaacgtgcgagcctgattctgaccaaaagtgcaaaccacatcgtggaggaagttcgtctgcgtaag

SEQ ID NO: 132 - protein, 326 aa, Artificial Sequence
  Engineered variant of Pantothenate Kinase from Escherichia coli
MHHHHHHGGSGSIKEQTEMTPYLQLDRNQWAAVRDSNPMTLSEDEIARLKGINEDLSLEEVAEVYLPLSRVLNFYISSNLRRQAQLEQFLGTNGQRIPYIISIAGSVAVGKSTFARVLQALLSRWPEHRYVEHITTDGFLHPNQVLKERGLMGKKGFPESYDMHRLMKFVKDLKSGVPNVTAPVYSHLIYDVIPDGDKTVVQPDILILEGLNVLQSGMDYPHDPHHVFVSDFVDFSIYVDAPEDLLQTWYINRFLKLREGAFTDPDSYFHGYAKLTKEEAIKTAMTIWKEMNSVNLKQNILPTRERASLILTKSANHIVEEVRLRK

SEQ ID NO: 133 - DNA, 978 bp, Artificial Sequence
  Engineered variant of Pantothenate Kinase from Escherichia coli
atgcaccatcatcatcatcatggcggtagcggcagcatcaaagagcaggttgagatgaccccgtacctgcaactggaccgtaaccaatgggcggcggtgcgtgatagtaacccgatgaccctgagcgaggacgaaatcgcgcgtctgaagggtattaacgaagatctgagcctggaggaagtggcggaagtctacctgccgctgagccgtgttctgaacttctatattagcagcaacctgcgtcgtcaggcgcagctggaacagtttctgggtaccaatggccagcgtatcccgtatatcattagcattgcgggtagcgtggcggttggcaaaagcacctttgcgcgtgtgctgcaggcgctgctgagccgttggccggagcatcgtcgtgttgaacatatcaccaccgacggcttcctgcacccgaaccaagtgctgaaggagcgtggtctgatggggaaaaagggtttcccggaaagctacgatatgcaccgtctgatgaaatttgttaaagacctgaagagcggtgtgccgaacgttaccgcgccggtgtacagccacctgatctatgatgttattccggacggcgataaaaccgtggttcagccggacatcctgattctggagggtctgaacgtgctgcaaagcggcatggactatccgcacgatccgcaccacgtgtttgttagcgacttcgtggattttagcatctacgttgacgcgccggaggatctgctgcagacctggtacattaaccgtttcctgaaactgcgtgagggtgcgttcaccgacccggatagctactttcacgggtatgcgaaactgaccaaggaagaggcgatcaaaaccgcgatgaccatttggaaggagatgaacagcgtgaacctgaagcaaaacattctgccgacccgtgaacgtgcgagcctgattctgaccaaaagtgcaaaccacatcgtggaggaagttcgtctgcgtaag

SEQ ID NO: 134 - protein, 326 aa, Artificial Sequence
  Engineered variant of Pantothenate Kinase from Escherichia coli
MHHHHHHGGSGSIKEQVEMTPYLQLDRNQWAAVRDSNPMTLSEDEIARLKGINEDLSLEEVAEVYLPLSRVLNFYISSNLRRQAQLEQFLGTNGQRIPYIISIAGSVAVGKSTFARVLQALLSRWPEHRRVEHITTDGFLHPNQVLKERGLMGKKGFPESYDMHRLMKFVKDLKSGVPNVTAPVYSHLIYDVIPDGDKTVVQPDILILEGLNVLQSGMDYPHDPHHVFVSDFVDFSIYVDAPEDLLQTWYINRFLKLREGAFTDPDSYFHGYAKLTKEEAIKTAMTIWKEMNSVNLKQNILPTRERASLILTKSANHIVEEVRLRK

SEQ ID NO: 135 - DNA, 978 bp, Artificial Sequence
  Engineered variant of Pantothenate Kinase from Escherichia coli
atgcaccatcatcatcatcatggcggtagcggcagcatcaaagagcagaccgagatgaccccgtacctgcaactggaccgtaaccaatgggcggcggtgcgtcgtagtaacccgatgaccctgagcgaggacgaaatcgcgcgtctgaagggtattaacgaagatctgagcctggaggaagtggcggaagtctacctgccgctgagccgtgttctgaacttctatattagcagcaacctgcgtcgtcaggcgcagctggaacagtttctgggtaccaatggccagcgtatcccgtatatcattagcattgcgggtagcgtggcggttggcaaaagcacctttgcgcgtgtgctgcaggcgctgctgagccgttggccggagcatcgtcgtgttgaacatatcaccaccgacggcttcctgcacccgaaccaagtgctgaaggagcgtggtctgatggggaaaaagggtttcccggaaagctacgatatgcaccgtctgatgaaatttgttaaagacctgaagagcggtgtgccgaacgttaccgcgccggtgtacagccacctgatctatgatgttattccggacggcgataaaaccgtggttcagccggacatcctgattctggagggtctgaacgtgctgcaaagcggcatggactatccgcacgatccgcaccacgtgtttgttagcgacttcgtggattttagcatctacgttgacgcgccggaggatctgctgcagacctggtacattaaccgtttcctgaaactgcgtgagggtgcgttcaccgacccggatagctactttcacgggtatgcgaaactgaccaaggaagaggcgatcaaaaccgcgatgaccatttggaaggagatgaacagcgtgaacctgaagcaaaacattctgccgacccgtgaacgtgcgagcctgattctgaccaaaagtgcaaaccacatcgtggaggaagttcgtctgcgtaag

SEQ ID NO: 136 - protein, 326 aa, Artificial Sequence
  Engineered variant of Pantothenate Kinase from Escherichia coli
MHHHHHHGGSGSIKEQTEMTPYLQLDRNQWAAVRRSNPMTLSEDEIARLKGINEDLSLEEVAEVYLPLSRVLNFYISSNLRRQAQLEQFLGTNGQRIPYIISIAGSVAVGKSTFARVLQALLSRWPEHRRVEHITTDGFLHPNQVLKERGLMGKKGFPESYDMHRLMKFVKDLKSGVPNVTAPVYSHLIYDVIPDGDKTVVQPDILILEGLNVLQSGMDYPHDPHHVFVSDFVDFSIYVDAPEDLLQTWYINRFLKLREGAFTDPDSYFHGYAKLTKEEAIKTAMTIWKEMNSVNLKQNILPTRERASLILTKSANHIVEEVRLRK

SEQ ID NO: 137 - DNA, 978 bp, Artificial Sequence
  Engineered variant of Pantothenate Kinase from Escherichia coli
atgcaccatcatcatcatcatggcggtagcggcagcatcaaagagcagaccgagatgaccccgtacctgcaactggaccgtaaccaatgggcggcggtgcgtgatagtaacccgatgaccctgagcgaggacgaaatcgcgcgtctgaagggtattaacgaagatctgagcctggaggaagtggcggaagtctacctgccgctgagccgtgttctgaacttctatattagcagcaacctgcgtcgtcaggcgtctctggaacagtttctgggtaccaatggccagcgtatcccgtatatcattagcattgcgggtagcgtggcggttggcaaaagcacctttgcgcgtgtgctgcaggcgctgctgagccgttggccggagcatcgtcgtgttgaacatatcaccaccgacggcttcctgcacccgaaccaagtgctgaaggagcgtggtctgatggggaaaaagggtttcccggaaagctacgatatgcaccgtctgatgaaatttgttaaagacctgaagagcggtgtgccgaacgttaccgcgccggtgtacagccacctgatctatgatgttattccggacggcgataaaaccgtggttcagccggacatcctgattctggagggtctgaacgtgctgcaaagcggcatggactatccgcacgatccgcaccacgtgtttgttagcgacttcgtggattttagcatctacgttgacgcgccggaggatctgctgcagacctggtacattaaccgtttcctgaaactgcgtgagggtgcgttcaccgacccggatagctactttcacgggtatgcgaaactgaccaaggaagaggcgatcaaaaccgcgatgaccatttggaaggagatgaacagcgtgaacctgaagcaaaacattctgccgacccgtgaacgtgcgagcctgattctgaccaaaagtgcaaaccacatcgtggaggaagttcgtctgcgtaag

SEQ ID NO: 138 - protein, 326 aa, Artificial Sequence
  Engineered variant of Pantothenate Kinase from Escherichia coli
MHHHHHHGGSGSIKEQTEMTPYLQLDRNQWAAVRDSNPMTLSEDEIARLKGINEDLSLEEVAEVYLPLSRVLNFYISSNLRRQASLEQFLGTNGQRIPYIISIAGSVAVGKSTFARVLQALLSRWPEHRRVEHITTDGFLHPNQVLKERGLMGKKGFPESYDMHRLMKFVKDLKSGVPNVTAPVYSHLIYDVIPDGDKTVVQPDILILEGLNVLQSGMDYPHDPHHVFVSDFVDFSIYVDAPEDLLQTWYINRFLKLREGAFTDPDSYFHGYAKLTKEEAIKTAMTIWKEMNSVNLKQNILPTRERASLILTKSANHIVEEVRLRK

SEQ ID NO: 139 - DNA, 978 bp, Artificial Sequence
  Engineered variant of Pantothenate Kinase from Escherichia coli
atgcaccatcatcatcatcatggcggtagcggcagcatcaaagagcagaccgagatgaccccgtacctgcaactggaccgtaaccaatgggcggcggtgcgtgatagtaacccgatgaccctgagcgaggacgaaatcgcgcgtctgaagggtattaacgaagatctgagcctggaggaagtggcggaagtctacctgccgctgagccgtgttctgaacttctatattagcagcaacctgcgtcgtcaggcgcagctggaacagtttctgggtaccaatggccagcgtatcccgtatatcattagcattgcgggtagcgtggcggttggcaaaagcacctttgcgcgtgtgctgcaggcgctgctgagcgggtggccggagcatcgtcgtgttgaacatatcaccaccgacggcttcctgcacccgaaccaagtgctgaaggagcgtggtctgatggggaaaaagggtttcccggaaagctacgatatgcaccgtctgatgaaatttgttaaagacctgaagagcggtgtgccgaacgttaccgcgccggtgtacagccacctgatctatgatgttattccggacggcgataaaaccgtggttcagccggacatcctgattctggagggtctgaacgtgctgcaaagcggcatggactatccgcacgatccgcaccacgtgtttgttagcgacttcgtggattttagcatctacgttgacgcgccggaggatctgctgcagacctggtacattaaccgtttcctgaaactgcgtgagggtgcgttcaccgacccggatagctactttcacgggtatgcgaaactgaccaaggaagaggcgatcaaaaccgcgatgaccatttggaaggagatgaacagcgtgaacctgaagcaaaacattctgccgacccgtgaacgtgcgagcctgattctgaccaaaagtgcaaaccacatcgtggaggaagttcgtctgcgtaag

SEQ ID NO: 140 - protein, 326 aa, Artificial Sequence
  Engineered variant of Pantothenate Kinase from Escherichia coli
MHHHHHHGGSGSIKEQTEMTPYLQLDRNQWAAVRDSNPMTLSEDEIARLKGINEDLSLEEVAEVYLPLSRVLNFYISSNLRRQAQLEQFLGTNGQRIPYIISIAGSVAVGKSTFARVLQALLSGWPEHRRVEHITTDGFLHPNQVLKERGLMGKKGFPESYDMHRLMKFVKDLKSGVPNVTAPVYSHLIYDVIPDGDKTVVQPDILILEGLNVLQSGMDYPHDPHHVFVSDFVDFSIYVDAPEDLLQTWYINRFLKLREGAFTDPDSYFHGYAKLTKEEAIKTAMTIWKEMNSVNLKQNILPTRERASLILTKSANHIVEEVRLRK

SEQ ID NO: 141 - DNA, 978 bp, Artificial Sequence
  Engineered variant of Pantothenate Kinase from Escherichia coli
atgcaccatcatcatcatcatggcggtagcggcagcatcaaagagcagaccgagatgaccccgtacctgcaactggaccgtaaccaatgggcggcggtgcgtgatagtaacccgatgaccctgagcgaggacgaaatcgcgcgtctgaagggtattaacgaagatctgagcctggaggaagtggcggaagtctacctgccgctgagccgtgttctgaacttctatattagcagcaacctgcgtcgtcaggcgcagctggaacagtttctgggtaccaatggccagcgtatcccgtatatcattagcattgcgggtagcgtggcggttggcaaaagcacctttgcgcgtgtgctgcaggcgctgctgagccgttggtcggagcatcgtcgtgttgaacatatcaccaccgacggcttcctgcacccgaaccaagtgctgaaggagcgtggtctgatggggaaaaagggtttcccggaaagctacgatatgcaccgtctgatgaaatttgttaaagacctgaagagcggtgtgccgaacgttaccgcgccggtgtacagccacctgatctatgatgttattccggacggcgataaaaccgtggttcagccggacatcctgattctggagggtctgaacgtgctgcaaagcggcatggactatccgcacgatccgcaccacgtgtttgttagcgacttcgtggattttagcatctacgttgacgcgccggaggatctgctgcagacctggtacattaaccgtttcctgaaactgcgtgagggtgcgttcaccgacccggatagctactttcacgggtatgcgaaactgaccaaggaagaggcgatcaaaaccgcgatgaccatttggaaggagatgaacagcgtgaacctgaagcaaaacattctgccgacccgtgaacgtgcgagcctgattctgaccaaaagtgcaaaccacatcgtggaggaagttcgtctgcgtaag

SEQ ID NO: 142 - protein, 326 aa, Artificial Sequence
  Engineered variant of Pantothenate Kinase from Escherichia coli
MHHHHHHGGSGSIKEQTEMTPYLQLDRNQWAAVRDSNPMTLSEDEIARLKGINEDLSLEEVAEVYLPLSRVLNFYISSNLRRQAQLEQFLGTNGQRIPYIISIAGSVAVGKSTFARVLQALLSRWSEHRRVEHITTDGFLHPNQVLKERGLMGKKGFPESYDMHRLMKFVKDLKSGVPNVTAPVYSHLIYDVIPDGDKTVVQPDILILEGLNVLQSGMDYPHDPHHVFVSDFVDFSIYVDAPEDLLQTWYINRFLKLREGAFTDPDSYFHGYAKLTKEEAIKTAMTIWKEMNSVNLKQNILPTRERASLILTKSANHIVEEVRLRK

SEQ ID NO: 143 - DNA, 978 bp, Artificial Sequence
  Engineered variant of Pantothenate Kinase from Escherichia coli
atgcaccatcatcatcatcatggcggtagcggcagcatcaaagagcagaccgagatgaccccgtacctgcaactggaccgtaaccaatgggcggcggtgcgtgatagtaacccgatgaccctgagcgaggacgaaatcgcgcgtctgaagggtattaacgaagatctgagcctggaggaagtggcggaagtctacctgccgctgagccgtgttctgaacttctatattagcagcgcgctgcgtcgtcaggcgcagctggaacagtttctgggtaccaatggccagcgtatcccgtatatcattagcattgcgggtagcgtggcggttggcaaaagcacctttgcgcgtgtgctgcaggcgctgctgagccgttggccggagcatcgtcgtgttgaacatatcaccaccgacggcttcctgcacccgaaccaagtgctgaaggagcgtggtctgatggggaaaaagggtttcccggaaagctacgatatgcaccgtctgatgaaatttgttaaagacctgaagagcggtgtgccgaacgttaccgcgccggtgtacagccacctgatctatgatgttattccggacggcgataaaaccgtggttcagccggacatcctgattctggagggtctgaacgtgctgcaaagcggcatggactatccgcacgatccgcaccacgtgtttgttagcgacttcgtggattttagcatctacgttgacgcgccggaggatctgctgcagacctggtacattaaccgtttcctgaaactgcgtgagggtgcgttcaccgacccggatagctactttcacgggtatgcgaaactgaccaaggaagaggcgatcaaaaccgcgatgaccatttggaaggagatgaacagcgtgaacctgaagcaaaacattctgccgacccgtgaacgtgcgagcctgattctgaccaaaagtgcaaaccacatcgtggaggaagttcgtctgcgtaag

SEQ ID NO: 144 - protein, 326 aa, Artificial Sequence
  Engineered variant of Pantothenate Kinase from Escherichia coli
MHHHHHHGGSGSIKEQTEMTPYLQLDRNQWAAVRDSNPMTLSEDEIARLKGINEDLSLEEVAEVYLPLSRVLNFYISSALRRQAQLEQFLGTNGQRIPYIISIAGSVAVGKSTFARVLQALLSRWPEHRRVEHITTDGFLHPNQVLKERGLMGKKGFPESYDMHRLMKFVKDLKSGVPNVTAPVYSHLIYDVIPDGDKTVVQPDILILEGLNVLQSGMDYPHDPHHVFVSDFVDFSIYVDAPEDLLQTWYINRFLKLREGAFTDPDSYFHGYAKLTKEEAIKTAMTIWKEMNSVNLKQNILPTRERASLILTKSANHIVEEVRLRK

SEQ ID NO: 145 - DNA, 978 bp, Artificial Sequence
  Engineered variant of Pantothenate Kinase from Escherichia coli
atgcaccatcatcatcatcatggcggtagcggcagcatcaaagagcagaccgagatgaccccgtacctgcaactggaccgtaaccaatgggcggcggtgcgtgatagtaacccgatgaccctgagcgaggacgaaatcgcgcgtctgaagggtattaacgaagatctgagcctggaggaagtggcggaagtctacctgccgctgagccgtgttctgaacttctatattagcagcaacctgcgtcgtcaggcgcagctggaacagtttctgggtaccaatggccagcgtatcccgtatatcattagcattgcgggtagcgtggcggttggcaaaagcacctttgcgcgtgtgctgcaggcgctgctgagccgttgggtggagcatcgtcgtgttgaacatatcaccaccgacggcttcctgcacccgaaccaagtgctgaaggagcgtggtctgatggggaaaaagggtttcccggaaagctacgatatgcaccgtctgatgaaatttgttaaagacctgaagagcggtgtgccgaacgttaccgcgccggtgtacagccacctgatctatgatgttattccggacggcgataaaaccgtggttcagccggacatcctgattctggagggtctgaacgtgctgcaaagcggcatggactatccgcacgatccgcaccacgtgtttgttagcgacttcgtggattttagcatctacgttgacgcgccggaggatctgctgcagacctggtacattaaccgtttcctgaaactgcgtgagggtgcgttcaccgacccggatagctactttcacgggtatgcgaaactgaccaaggaagaggcgatcaaaaccgcgatgaccatttggaaggagatgaacagcgtgaacctgaagcaaaacattctgccgacccgtgaacgtgcgagcctgattctgaccaaaagtgcaaaccacatcgtggaggaagttcgtctgcgtaag

SEQ ID NO: 146 - protein, 326 aa, Artificial Sequence
  Engineered variant of Pantothenate Kinase from Escherichia coli
MHHHHHHGGSGSIKEQTEMTPYLQLDRNQWAAVRDSNPMTLSEDEIARLKGINEDLSLEEVAEVYLPLSRVLNFYISSNLRRQAQLEQFLGTNGQRIPYIISIAGSVAVGKSTFARVLQALLSRWVEHRRVEHITTDGFLHPNQVLKERGLMGKKGFPESYDMHRLMKFVKDLKSGVPNVTAPVYSHLIYDVIPDGDKTVVQPDILILEGLNVLQSGMDYPHDPHHVFVSDFVDFSIYVDAPEDLLQTWYINRFLKLREGAFTDPDSYFHGYAKLTKEEAIKTAMTIWKEMNSVNLKQNILPTRERASLILTKSANHIVEEVRLRK

SEQ ID NO: 147 - DNA, 978 bp, Artificial Sequence
  Engineered variant of Pantothenate Kinase from Escherichia coli
atgcaccatcatcatcatcatggcggtagcggcagcatcaaagagcagaccgagatgaccccgtacctgcaactggaccgtaaccaatgggcggcggtgcgtgatagtaacccgatgaccctgagcgaggacgaaaaggcgcgtctgaagggtattaacgaagatctgagcctggaggaagtggcggaagtctacctgccgctgagccgtgttctgaacttctatattagcagcaacctgcgtcgtcaggcgcagctggaacagtttctgggtaccaatggccagcgtatcccgtatatcattagcattgcgggtagcgtggcggttggcaaaagcacctttgcgcgtgtgctgcaggcgctgctgagccgttggccggagcatcgtcgtgttgaacatatcaccaccgacggcttcctgcacccgaaccaagtgctgaaggagcgtggtctgatggggaaaaagggtttcccggaaagctacgatatgcaccgtctgatgaaatttgttaaagacctgaagagcggtgtgccgaacgttaccgcgccggtgtacagccacctgatctatgatgttattccggacggcgataaaaccgtggttcagccggacatcctgattctggagggtctgaacgtgctgcaaagcggcatggactatccgcacgatccgcaccacgtgtttgttagcgacttcgtggattttagcatctacgttgacgcgccggaggatctgctgcagacctggtacattaaccgtttcctgaaactgcgtgagggtgcgttcaccgacccggatagctactttcacgggtatgcgaaactgaccaaggaagaggcgatcaaaaccgcgatgaccatttggaaggagatgaacagcgtgaacctgaagcaaaacattctgccgacccgtgaacgtgcgagcctgattctgaccaaaagtgcaaaccacatcgtggaggaagttcgtctgcgtaag

SEQ ID NO: 148 - protein, 326 aa, Artificial Sequence
  Engineered variant of Pantothenate Kinase from Escherichia coli
MHHHHHHGGSGSIKEQTEMTPYLQLDRNQWAAVRDSNPMTLSEDEKARLKGINEDLSLEEVAEVYLPLSRVLNFYISSNLRRQAQLEQFLGTNGQRIPYIISIAGSVAVGKSTFARVLQALLSRWPEHRRVEHITTDGFLHPNQVLKERGLMGKKGFPESYDMHRLMKFVKDLKSGVPNVTAPVYSHLIYDVIPDGDKTVVQPDILILEGLNVLQSGMDYPHDPHHVFVSDFVDFSIYVDAPEDLLQTWYINRFLKLREGAFTDPDSYFHGYAKLTKEEAIKTAMTIWKEMNSVNLKQNILPTRERASLILTKSANHIVEEVRLRK

SEQ ID NO: 149 - DNA, 978 bp, Artificial Sequence
  Engineered variant of Pantothenate Kinase from Escherichia coli
atgcaccatcatcatcatcatggcggtagcggcagcatcaaagagcagaccgagatgaccccgtacctgcaactggaccgtaaccaatgggcggcggtgcgtgatagtaacccgatgaccctgagcgaggacgaaatcgcgcgtctgaagggtattaacgaagatctgagcctggaggaagtggcggaagtctacctgccgctgagccgtgttctgaacttctatattagcagcaacctgcgtcgtcaggcgcagctggaacagtttctgggtaccaatggccagcgtatcccgtatatcattagcattgcgggtagcgtggcggtcggcaaaagcacctttgcgcgtgtgctgcaggcgctgctgagccgttggccggagcatcgtcgtgttgaacatatcaccaccgacggcttcctgctgccgaaccaagtgctgaaggagcgtggtctgatggggaaaaagggtttcccggaaagctacgatatgcaccgtctgatgaaatttgttaaagacctgaagagcggtgtgccgaacgttaccgcgccggtgtacagccacctgatctatgatgttgtcccggacggcgataaaaccgtggttcagccggacatcctgattctggagggtctgaacgtgctgcaaagcggcatggattatccgcacgatccgcaccacgtgtttgttagcgacttcgtggattttagcatctacgttgacgcgccggaggatctgctgcagacctggtacctgaaccgtttcctgaaactgcgtgagggtgcgttcaccgacccggatagctactttcacgggtatgcgaaactgaccaaggaagaggcgatcaaaaccgcgatgaccatttggaaggagatgaacagcgtgaacctgaagcaaaacattctgccgacccgtgaacgtgcgagcctgattttgaccaaaagtgcaaaccacatcgtggaggaagtttgtctgcgtaag

SEQ ID NO: 150 - protein, 326 aa, Artificial Sequence
  Engineered variant of Pantothenate Kinase from Escherichia coli
MHHHHHHGGSGSIKEQTEMTPYLQLDRNQWAAVRDSNPMTLSEDEIARLKGINEDLSLEEVAEVYLPLSRVLNFYISSNLRRQAQLEQFLGTNGQRIPYIISIAGSVAVGKSTFARVLQALLSRWPEHRRVEHITTDGFLLPNQVLKERGLMGKKGFPESYDMHRLMKFVKDLKSGVPNVTAPVYSHLIYDVVPDGDKTVVQPDILILEGLNVLQSGMDYPHDPHHVFVSDFVDFSIYVDAPEDLLQTWYLNRFLKLREGAFTDPDSYFHGYAKLTKEEAIKTAMTIWKEMNSVNLKQNILPTRERASLILTKSANHIVEEVCLRK

SEQ ID NO: 151 - DNA, 978 bp, Artificial Sequence
  Engineered variant of Pantothenate Kinase from Escherichia coli
atgcaccatcatcatcatcatggcggtagcggcagcatcaaagagcagaccgagatgaccccgtacctgcaactggaccgtaaccaatgggcggcggtgcgtgatagtaacccgatgaccctgagcgaggacgaaatcgcgcgtctgaagggtattaacgaagatctgagcctggaggaagtggcggaagtctacctgccgctgagccgtgttctgaacttctatattagcagcaacctgcgtcgtcaggcgcagctggaacagtttctgggtaccaatggccagcgtatcccgtatatcattagcattgcgggtagcgtggcggttggcaaaagcacctttgcgcgtgtgctgcaggcgctgctgagccgttggccggagcatcgtcgtgttgaacatatcagcaccgacggcttcctgcacccgaaccaagtgctgaaggagcgtggtctgatggggaaaaagggtttcccggaaagctacgatatgcaccgtctgatgaaatttgttaaagacctgaagagcggtgtgccgaacgttaccgcgccggtgtacagccacctgatctatgatgttattccggacggcgataaaaccgtggttcagccggacatcctgattctggagggtctgaacgtgctgcaaagcggcatggactatccgcacgatccgcaccacgtgtttgttagcgacttcgtggattttagcatctacgttgacgcgccggaggatctgctgcaggcgtggtacctgaaccgtttcctgaaactgcgtgagggtgcgttcaccgacccggatagctactttcacgggtatgcgaaactgaccaaggaagaggcgatcaaaaccgcgatgaccatttggaaggagaagaacagcgtgaacctgcgccaaaacattctgccgacccgtgaacgtgcgagcctgattttgaccaaaagtgcaaaccacatcgtggaggaagttcgtctgcgtaag

SEQ ID NO: 152 - protein, 326 aa, Artificial Sequence
  Engineered variant of Pantothenate Kinase from Escherichia coli
MHHHHHHGGSGSIKEQTEMTPYLQLDRNQWAAVRDSNPMTLSEDEIARLKGINEDLSLEEVAEVYLPLSRVLNFYISSNLRRQAQLEQFLGTNGQRIPYIISIAGSVAVGKSTFARVLQALLSRWPEHRRVEHISTDGFLHPNQVLKERGLMGKKGFPESYDMHRLMKFVKDLKSGVPNVTAPVYSHLIYDVIPDGDKTVVQPDILILEGLNVLQSGMDYPHDPHHVFVSDFVDFSIYVDAPEDLLQAWYLNRFLKLREGAFTDPDSYFHGYAKLTKEEAIKTAMTIWKEKNSVNLRQNILPTRERASLILTKSANHIVEEVRLRK

SEQ ID NO: 153 - DNA, 978 bp, Artificial Sequence
  Engineered variant of Pantothenate Kinase from Escherichia coli
atgcaccatcatcatcatcatggcggtagcggcagcatcaaagagcagaccgagatgaccccgtacctgcaactggaccgtaaccaatgggcggcggtgcgtgatagtaacccgatgaccctgagcgaggacgaaatcgcgcgtctgaagggtattaacgaagatctgagcctggaggaagtggcggaagtctacctgccgctgagccgtgttctgaacttgtatattagcagcaacctgcgtcgtcaggcgcagctggaacagtttctgggtaccaatggccagcgtatcccgtatatcattagcattgcgggtagcgtggcggttggcaaaagcacctttgcgcgtgtgctgcaggcgctgctgagccgttggccggagcatcgtcgtgttgaacatatcaccaccgacggcttcctgcacccgaaccaagtgctgaaggagcgtggtctgatggggaaaaagggtttcccggaaagctacgatatgcaccgtctgatgaaatttgttaaagacctgaagagcggtgtgccgaacgttaccgcgccggtgtacagccacctgatctatgatgttattccggacggcgataaaaccgtggttcagccggacatcctgattctggagggtctgaacgtgctgcaaagcggcatggactatccgcacgatccgcaccacgtgtttgttagcgacttcgtggattttagcatctacgttgacgcgccggaggatctgctgcagacctggtacattaaccgtttcctgaaactgcgtgagggtgcgttcaccgacccggatagctactttcacgggtatgcgaaactgaccaaggaagaggcgatcaaaaccgcgatgaccatttggaaggagatgaacagcgtgaacctgaagcaaaacattctgccgacccgtgaacgtgcgagcctgattctgaccaaaagtgcaaaccacatcgtggaggaagttcgtctgcgtaag

SEQ ID NO: 154 - protein, 326 aa, Artificial Sequence
  Engineered variant of Pantothenate Kinase from Escherichia coli
MHHHHHHGGSGSIKEQTEMTPYLQLDRNQWAAVRDSNPMTLSEDEIARLKGINEDLSLEEVAEVYLPLSRVLNLYISSNLRRQAQLEQFLGTNGQRIPYIISIAGSVAVGKSTFARVLQALLSRWPEHRRVEHITTDGFLHPNQVLKERGLMGKKGFPESYDMHRLMKFVKDLKSGVPNVTAPVYSHLIYDVIPDGDKTVVQPDILILEGLNVLQSGMDYPHDPHHVFVSDFVDFSIYVDAPEDLLQTWYINRFLKLREGAFTDPDSYFHGYAKLTKEEAIKTAMTIWKEMNSVNLKQNILPTRERASLILTKSANHIVEEVRLRK

SEQ ID NO: 155 - DNA, 978 bp, Artificial Sequence
  Engineered variant of Pantothenate Kinase from Escherichia coli
atgcaccatcatcatcatcatggcggtagcggcagcatcaaagagcagaccgagatgaccccgtacctgcaactggaccgtaaccaatgggcggcggtgcgtgatagtaacccgatgaccctgagcgaggacgaaatcgcgcgtctgaagggtattaacgaagatctgagcctggaggaagtggcggaagtctacctgccgctgagccgtgttctgaacttctatattagcagcaacctgcgtcgtcaggcgcagctggaacagtttctgggtaccaatggccagcgtatcccgtatatcattagcattgcgggtagcgtggcggttggcaaaagcacctttgcgcgtgtgctgcaggcgctgctgagccgttggccggagtctcgtcgtgttgaacatatcaccaccgacggcttcctgcacccgaaccaagtgctgaaggagcgtggtctgatggggaaaaagggtttcccggaaagctacgatatgcaccgtctgatgaaatttgttaaagacctgaagagcggtgtgccgaacgttaccgcgccggtgtacagccacctgatctatgatgttattccggacggcgataaaaccgtggttcagccggacatcctgattctggagggtctgaacgtgctgcaaagcggcatggactatccgcacgatccgcaccacgtgtttgttagcgacttcgtggattttagcatctacgttgacgcgccggaggatctgctgcagacctggtacattaaccgtttcctgaaactgcgtgagggtgcgttcaccgacccggatagctactttcacgggtatgcgaaactgaccaaggaagaggcgatcaaaaccgcgatgaccatttggaaggagatgaacagcgtgaacctgaagcaaaacattctgccgacccgtgaacgtgcgagcctgattctgaccaaaagtgcaaaccacatcgtggaggaagttcgtctgcgtaag

SEQ ID NO: 156 - protein, 326 aa, Artificial Sequence
  Engineered variant of Pantothenate Kinase from Escherichia coli
MHHHHHHGGSGSIKEQTEMTPYLQLDRNQWAAVRDSNPMTLSEDEIARLKGINEDLSLEEVAEVYLPLSRVLNFYISSNLRRQAQLEQFLGTNGQRIPYIISIAGSVAVGKSTFARVLQALLSRWPESRRVEHITTDGFLHPNQVLKERGLMGKKGFPESYDMHRLMKFVKDLKSGVPNVTAPVYSHLIYDVIPDGDKTVVQPDILILEGLNVLQSGMDYPHDPHHVFVSDFVDFSIYVDAPEDLLQTWYINRFLKLREGAFTDPDSYFHGYAKLTKEEAIKTAMTIWKEMNSVNLKQNILPTRERASLILTKSANHIVEEVRLRK

SEQ ID NO: 157 - DNA, 978 bp, Artificial Sequence
  Engineered variant of Pantothenate Kinase from Escherichia coli
atgcaccatcatcatcatcatggcggtagcggcagcatcaaagagcagaccgagatgaccccgtacctgcaactggaccgtaaccaatgggcggcggtgcgtgatagtaacccgatgaccctgagcgaggacgaaatcgcgcgtctgaagggtattaacgaagatctgagcctggaggaagtggcggaagtctacctgccgctgagccgtgttctgaacttctatattagcagcaacctgcgtcgtcaggcgcagctggaacagtttctgggtaccaatggccagcgtatcccgtatatcattagcattgcgggtagcgtggcggttggcaaaagcacctttgcgcgtgtgctgcaggcgctgctgagccgttggccggagcatcgtcgtgttgaacatatcaccaccgacggcttcctgcacccgaaccaagtgctgaaggagcgtggtctgatggggaaaaagggtttcccggaaagctacgatatgcaccgtctgatgaaatttgttaaagacctgaagagcggtgtgccgaacgttaccgcgccggtgtacagccacctgatctatgatgttattccggacggcgttaaaaccgtggttcagccggacatcctgattctggagggtctgaacgtgctgcaaagcggcatggactatccgcacgatccgcaccacgtgtttgttagcgacttcgtggattttagcatctacgttgacgcgccggaggatctgctgcagacctggtacattaaccgtttcctgaaactgcgtgagggtgcgttcaccgacccggatagctactttcacgggtatgcgaaactgaccaaggaagaggcgatcaaaaccgcgatgaccatttggaaggagatgaacagcgtgaacctgaagcaaaacattctgccgacccgtgaacgtgcgagcctgattctgaccaaaagtgcaaaccacatcgtggaggaagttcgtctgcgtaag

SEQ ID NO: 158 - protein, 326 aa, Artificial Sequence
  Engineered variant of Pantothenate Kinase from Escherichia coli
MHHHHHHGGSGSIKEQTEMTPYLQLDRNQWAAVRDSNPMTLSEDEIARLKGINEDLSLEEVAEVYLPLSRVLNFYISSNLRRQAQLEQFLGTNGQRIPYIISIAGSVAVGKSTFARVLQALLSRWPEHRRVEHITTDGFLHPNQVLKERGLMGKKGFPESYDMHRLMKFVKDLKSGVPNVTAPVYSHLIYDVIPDGVKTVVQPDILILEGLNVLQSGMDYPHDPHHVFVSDFVDFSIYVDAPEDLLQTWYINRFLKLREGAFTDPDSYFHGYAKLTKEEAIKTAMTIWKEMNSVNLKQNILPTRERASLILTKSANHIVEEVRLRK

SEQ ID NO: 159 - DNA, 978 bp, Artificial Sequence
  Engineered variant of Pantothenate Kinase from Escherichia coli
atgcaccatcatcatcatcatggcggtagcggcagcatcaaagagcagaccgagatgaccccgtacctgcaactggaccgtaaccaatgggcggcggtgcgtgatagtaacccgatgaccctgagcgaggacgaaatcgcgcgtctgaagggtattaacgaagatctgagcctggaggaagtggcggaagtctacctgccgctgagccgtgttctgaacttctatattagcagcaacctgcgtcgtcaggcgcagctggaacagtttctgggtaccaatggccagcgtatcccgtatatcattagcattgcgggtagcgtggcggttggcaaaagcacctttgcgcgtgtgctgcaggcgctgctgagccgttggccggagcatcgtcgtgttgaacatatcaccaccgacggcttcctgcacccgaaccaagtgctgaaggagcgtggtctgatggggaaaaagggtttcccggaaagctacgatatgcaccgtctgatgaaatttgttaaagacctgaagagcggtgtgccgaacgttaccgcgccggtgtacagccacctgatctatgatgttattccggacggcgataaaaccgtggttcagccggacatcctgattctggagggtctgaacgtgctgcaaagcggcatggactatccgcacgatccgcaccacgtgtttgttagcgacttcgtggattttagcatctacgttgacgcgccggaggatctgctgcagacctggtacattaaccgtttcctgaaactgcgtgagggtgcgttcaccgacccggatagctactttcacgggtatgcgaaactgaccaaggaagaggcgatcaaaaccgcgatgaccatttggaaggagatgaacagcgtgaacctgaagcaaaacattctgccgacccgtgaacgtgcggctctgattctgaccaaaagtgcaaaccacatcgtggaggaagttcgtctgcgtaag

SEQ ID NO: 160 - protein, 326 aa, Artificial Sequence
  Engineered variant of Pantothenate Kinase from Escherichia coli
MHHHHHHGGSGSIKEQTEMTPYLQLDRNQWAAVRDSNPMTLSEDEIARLKGINEDLSLEEVAEVYLPLSRVLNFYISSNLRRQAQLEQFLGTNGQRIPYIISIAGSVAVGKSTFARVLQALLSRWPEHRRVEHITTDGFLHPNQVLKERGLMGKKGFPESYDMHRLMKFVKDLKSGVPNVTAPVYSHLIYDVIPDGDKTVVQPDILILEGLNVLQSGMDYPHDPHHVFVSDFVDFSIYVDAPEDLLQTWYINRFLKLREGAFTDPDSYFHGYAKLTKEEAIKTAMTIWKEMNSVNLKQNILPTRERAALILTKSANHIVEEVRLRK

SEQ ID NO: 161 - DNA, 978 bp, Artificial Sequence
  Engineered variant of Pantothenate Kinase from Escherichia coli
atgcaccatcatcatcatcatggcggtagcggcagcatcaaagagcagaccgagatgaccccgtacctgcaactggaccgtaaccaatgggcggcggtgcgtgatagtaacccgatgaccctgagcgaggacgaaatcgcgcgtctgaagggtattaacgaagatctgagcctggaggaagtggcggaagtctacctgccgctgagccgtgttctgaacttctatattagcagcaacctgcgtcgtcaggcgcagctggaacagtttctgggtaccaatggccagcgtatcccgtatatcattagcattgcgggtagcgtggcggttggcaaaagcacctttgcgcgtgtgctgcaggcgctgctgagccgttggccggagcatcgtcgtgttgaacatatcaccaccgacggcttcctgcacccgaaccaagtgctgaaggagcgtggtctgatggggaaaaagggtttcccggaaagctacgatatgcaccgtctgatgaaatttgttaaagacctgaagagcggtgtgccgaacgttaccgcgccggtgtacagccacctgatctatgatgttattccggacggcgataaaaccgtggttcagccggacatcctgattctggagggtctgaacgtgctgcaaagcggcatggactatagtcacgatccgcaccacgtgtttgttagcgacttcgtggattttagcatctacgttgacgcgccggaggatctgctgcagacctggtacattaaccgtttcctgaaactgcgtgagggtgcgttcaccgacccggatagctactttcacgggtatgcgaaactgaccaaggaagaggcgatcaaaaccgcgatgaccatttggaaggagatgaacagcgtgaacctgaagcaaaacattctgccgacccgtgaacgtgcgagcctgattctgaccaaaagtgcaaaccacatcgtggaggaagttcgtctgcgtaag

SEQ ID NO: 162 - protein, 326 aa, Artificial Sequence
  Engineered variant of Pantothenate Kinase from Escherichia coli
MHHHHHHGGSGSIKEQTEMTPYLQLDRNQWAAVRDSNPMTLSEDEIARLKGINEDLSLEEVAEVYLPLSRVLNFYISSNLRRQAQLEQFLGTNGQRIPYIISIAGSVAVGKSTFARVLQALLSRWPEHRRVEHITTDGFLHPNQVLKERGLMGKKGFPESYDMHRLMKFVKDLKSGVPNVTAPVYSHLIYDVIPDGDKTVVQPDILILEGLNVLQSGMDYSHDPHHVFVSDFVDFSIYVDAPEDLLQTWYINRFLKLREGAFTDPDSYFHGYAKLTKEEAIKTAMTIWKEMNSVNLKQNILPTRERASLILTKSANHIVEEVRLRK

SEQ ID NO: 163 - DNA, 978 bp, Artificial Sequence
  Engineered variant of Pantothenate Kinase from Escherichia coli
atgcaccatcatcatcatcatggcggtagcggcagcatcaaagagcagaccgagatgaccccgtacctgcaactggaccgtaaccaatgggcggcggtgcgtgatagtaacccgatgaccctgagcgaggacgaaatcgcgcgtctgaagggtattaacgaagatctgagcctggaggaagtggcggaagtctacctgccgctgagccgtgttctgaacttctatattagcagcaacctgcgtcgtcaggcgcagctggaacagtttctgggtaccaatggccagcgtatcccgtatatcattagcattgcgggtagcgtggcggttggcaaaagcacctttgcgcgtgtgctgcaggcgctgctgagccgttggccggagcatcgtcgtgttgaacatatcaccaccgacggcttcctgcacccgaaccaagtgctgaaggagcgtggtctgatggggaaaaagggtttcccggaaagctacgatatgcaccgtctgatgaaatttgttaaagacctgaagagcggtgtgccgaacgttaccgcgccggtgtacagccacctgatctatgatgttattccggacggcgatcggaccgtggttcagccggacatcctgattctggagggtctgaacgtgctgcaaagcggcatggactatccgcacgatccgcaccacgtgtttgttagcgacttcgtggattttagcatctacgttgacgcgccggaggatctgctgcagacctggtacattaaccgtttcctgaaactgcgtgagggtgcgttcaccgacccggatagctactttcacgggtatgcgaaactgaccaaggaagaggcgatcaaaaccgcgatgaccatttggaaggagatgaacagcgtgaacctgaagcaaaacattctgccgacccgtgaacgtgcgagcctgattctgaccaaaagtgcaaaccacatcgtggaggaagttcgtctgcgtaag

SEQ ID NO: 164 - protein, 326 aa, Artificial Sequence
  Engineered variant of Pantothenate Kinase from Escherichia coli
MHHHHHHGGSGSIKEQTEMTPYLQLDRNQWAAVRDSNPMTLSEDEIARLKGINEDLSLEEVAEVYLPLSRVLNFYISSNLRRQAQLEQFLGTNGQRIPYIISIAGSVAVGKSTFARVLQALLSRWPEHRRVEHITTDGFLHPNQVLKERGLMGKKGFPESYDMHRLMKFVKDLKSGVPNVTAPVYSHLIYDVIPDGDRTVVQPDILILEGLNVLQSGMDYPHDPHHVFVSDFVDFSIYVDAPEDLLQTWYINRFLKLREGAFTDPDSYFHGYAKLTKEEAIKTAMTIWKEMNSVNLKQNILPTRERASLILTKSANHIVEEVRLRK

SEQ ID NO: 165 - DNA, 978 bp, Artificial Sequence
  Engineered variant of Pantothenate Kinase from Escherichia coli
atgcaccatcatcatcatcatggcggtagcggcagcatcaaagagcagaccgagatgaccccgtacctgcaactggaccgtaaccaatgggcggcggtgcgtgatagtaacccgatgaccctgagcgaggacgaaatcgcgcgtctgaagggtattaacgaagatctgagcctggaggaagtggcggaagtctacctgccgctgagccgtgttctgaacttctatattagcagcaacctgcgtcgtcaggcgcagctggaacagtttctgggtaccaatggccagcgtatcccgtatatcattagcattgcgggtagcgtggcggtcggcaaaagcacctttgcgcgtgtgctgcaggcgctgctgagccgttggccggagcatcgtcgtgttgaacatatcaccaccgacggcttcctgctgccgaaccaagtgctgaaggagcgtggtctgatggggaaaaagggtttcccggaaagctacgatatgcaccgtctgatgaaatttgttaaagacctgaagagcggtgtgccgaacgttaccgcgccggtgtacagccacctgatctatgatgttattccggacggcgataaaaccgtggttcagccggacatcctgattctggagggtctgaacgtgctgcaaagcggcatggactatccgcacgatccgcaccacgtgtttgttagcgacttcgtggattttagcatctacgttgacgcgccggaggatctgctgcagacctggtacctgaaccgtttcctgaaactgcgtgagggtgcgttcaccgacccggatagctactttcacgggtatgcgaaactgaccaaggaagaggcgatcaaaaccgcgatgaccatttggaaggagatgaacagcgtgaacctgaagcaaaacattctgccgacccgtgagcgtgcgagcctgattttgaccaaaagtgcaaaccacatcgtggaggaagtttgtctgcgtaag

SEQ ID NO: 166 - protein, 326 aa, Artificial Sequence
  Engineered variant of Pantothenate Kinase from Escherichia coli
MHHHHHHGGSGSIKEQTEMTPYLQLDRNQWAAVRDSNPMTLSEDEIARLKGINEDLSLEEVAEVYLPLSRVLNFYISSNLRRQAQLEQFLGTNGQRIPYIISIAGSVAVGKSTFARVLQALLSRWPEHRRVEHITTDGFLLPNQVLKERGLMGKKGFPESYDMHRLMKFVKDLKSGVPNVTAPVYSHLIYDVIPDGDKTVVQPDILILEGLNVLQSGMDYPHDPHHVFVSDFVDFSIYVDAPEDLLQTWYLNRFLKLREGAFTDPDSYFHGYAKLTKEEAIKTAMTIWKEMNSVNLKQNILPTRERASLILTKSANHIVEEVCLRK

SEQ ID NO: 167 - DNA, 978 bp, Artificial Sequence
  Engineered variant of Pantothenate Kinase from Escherichia coli
atgcaccatcatcatcatcatggcggtagcggcagcatcaaagagcagaccgagatgaccccgtacctgcaactggaccgtaaccaatgggcggcggtgcgtgatagtaacccgatgaccctgagcgaggacgaaatcgcgcgtctgaagggtattaacgaagatctgagcctggaggaagtggcggaagtctacctgccgctgagccgtgttctgaacttctatattagcagcaacctgcgtcgtcaggcgcagctggaacagtttctgggtaccaatggccagcgtatcccgtatatcattagcattgcgggtagcgtggcggttggcaaaagcacctttgcgcgtgtgctgcaggcgctgctgagccgttggcaggagcatcgtcgtgttgaacatatcaccaccgacggcttcctgcacccgaaccaagtgctgaaggagcgtggtctgatggggaaaaagggtttcccggaaagctacgatatgcaccgtctgatgaaatttgttaaagacctgaagagcggtgtgccgaacgttaccgcgccggtgtacagccacctgatctatgatgttattccggacggcgataaaaccgtggttcagccggacatcctgattctggagggtctgaacgtgctgcaaagcggcatggactatccgcacgatccgcaccacgtgtttgttagcgacttcgtggattttagcatctacgttgacgcgccggaggatctgctgcagacctggtacattaaccgtttcctgaaactgcgtgagggtgcgttcaccgacccggatagctactttcacgggtatgcgaaactgaccaaggaagaggcgatcaaaaccgcgatgaccatttggaaggagatgaacagcgtgaacctgaagcaaaacattctgccgacccgtgaacgtgcgagcctgattctgaccaaaagtgcaaaccacatcgtggaggaagttcgtctgcgtaag

SEQ ID NO: 168 - protein, 326 aa, Artificial Sequence
  Engineered variant of Pantothenate Kinase from Escherichia coli
MHHHHHHGGSGSIKEQTEMTPYLQLDRNQWAAVRDSNPMTLSEDEIARLKGINEDLSLEEVAEVYLPLSRVLNFYISSNLRRQAQLEQFLGTNGQRIPYIISIAGSVAVGKSTFARVLQALLSRWQEHRRVEHITTDGFLHPNQVLKERGLMGKKGFPESYDMHRLMKFVKDLKSGVPNVTAPVYSHLIYDVIPDGDKTVVQPDILILEGLNVLQSGMDYPHDPHHVFVSDFVDFSIYVDAPEDLLQTWYINRFLKLREGAFTDPDSYFHGYAKLTKEEAIKTAMTIWKEMNSVNLKQNILPTRERASLILTKSANHIVEEVRLRK

SEQ ID NO: 169 - DNA, 978 bp, Artificial Sequence
  Engineered variant of Pantothenate Kinase from Escherichia coli
atgcaccatcatcatcatcatggcggtagcggcagcatcaaagagcagaccgagatgaccccgtacctgcaactggaccgtaaccaatgggcggcggtgcgtgatagtaacccgatgaccctgagcgaggacgaaatcgcgcgtctgaagggtattaacgaagatctgagcctggaggaagtggcggaagtctacctgccgctgagccgtgttctgaacttctatattagcagcaacctgcgtcgtcaggcgcagctggaacagtttctgggtaccaatggccagcgtatcccgtatatcattagcattgcgggtagcgtggcggttggcaaaagcacctttgcgcgtgtgctgcaggcgctgctgagccgttggccggagcatcgtcgtgttgaacatatcaccaccgacggcttcctgcacccgaaccaaattctgaaggagcgtggtctgatggggaaaaagggtttcccggaaagctacgatatgcaccgtctgatgaaatttgttaaagacctgaagagcggtgtgccgaacgttaccgcgccggtgtacagccacctgatctatgatgttattccggacggcgataaaaccgtggttcagccggacatcctgattctggagggtctgaacgtgctgcaaagcggcatggactatccgcacgatccgcaccacgtgtttgttagcgacttcgtggattttagcatctacgttgacgcgccggaggatctgctgcagacctggtacattaaccgtttcctgaaactgcgtgagggtgcgttcaccgacccggatagctactttcacgggtatgcgaaactgaccaaggaagaggcgatcaaaaccgcgatgaccatttggaaggagatgaacagcgtgaacctgaagcaaaacattctgccgacccgtgaacgtgcgagcctgattctgaccaaaagtgcaaaccacatcgtggaggaagttcgtctgcgtaag

SEQ ID NO: 170 - protein, 326 aa, Artificial Sequence
  Engineered variant of Pantothenate Kinase from Escherichia coli
MHHHHHHGGSGSIKEQTEMTPYLQLDRNQWAAVRDSNPMTLSEDEIARLKGINEDLSLEEVAEVYLPLSRVLNFYISSNLRRQAQLEQFLGTNGQRIPYIISIAGSVAVGKSTFARVLQALLSRWPEHRRVEHITTDGFLHPNQILKERGLMGKKGFPESYDMHRLMKFVKDLKSGVPNVTAPVYSHLIYDVIPDGDKTVVQPDILILEGLNVLQSGMDYPHDPHHVFVSDFVDFSIYVDAPEDLLQTWYINRFLKLREGAFTDPDSYFHGYAKLTKEEAIKTAMTIWKEMNSVNLKQNILPTRERASLILTKSANHIVEEVRLRK

SEQ ID NO: 171 - DNA, 978 bp, Artificial Sequence
  Engineered variant of Pantothenate Kinase from Escherichia coli
atgcaccatcatcatcatcatggcggtagcggcagcatcaaagagcagaccgagatgaccccgtacctgcaactggaccgtaaccaatgggcggcggtgcgtgatagtaacccgatgaccctgagcgaggacgaaatcgcgcgtctgaagggtattaacgaagatctgagcctggaggaagtggcggaagtctacctgccgctgagccgtgttctgaacttctatattagcagcaacctgcgtcgtcaggcgcagctggaacagtttctgtgtaccaatggccagcgtatcccgtatatcattagcattgcgggtagcgtggcggttggcaaaagcacctttgcgcgtgtgctgcaggcgctgctgagccgttggccggagcatcgtcgtgttgaacatatcaccaccgacggcttcctgcacccgaaccaagtgctgaaggagcgtggtctgatggggaaaaagggtttcccggaaagctacgatatgcaccgtctgatgaaatttgttaaagacctgaagagcggtgtgccgaacgttaccgcgccggtgtacagccacctgatctatgatgttattccggacggcgataaaaccgtggttcagccggacatcctgattctggagggtctgaacgtgctgcaaagcggcatggactatccgcacgatccgcaccacgtgtttgttagcgacttcgtggattttagcatctacgttgacgcgccggaggatctgctgcagacctggtacattaaccgtttcctgaaactgcgtgagggtgcgttcaccgacccggatagctactttcacgggtatgcgaaactgaccaaggaagaggcgatcaaaaccgcgatgaccatttggaaggagatgaacagcgtgaacctgaagcaaaacattctgccgacccgtgaacgtgcgagcctgattctgaccaaaagtgcaaaccacatcgtggaggaagttcgtctgcgtaag

SEQ ID NO: 172 - protein, 326 aa, Artificial Sequence
  Engineered variant of Pantothenate Kinase from Escherichia coli
MHHHHHHGGSGSIKEQTEMTPYLQLDRNQWAAVRDSNPMTLSEDEIARLKGINEDLSLEEVAEVYLPLSRVLNFYISSNLRRQAQLEQFLCTNGQRIPYIISIAGSVAVGKSTFARVLQALLSRWPEHRRVEHITTDGFLHPNQVLKERGLMGKKGFPESYDMHRLMKFVKDLKSGVPNVTAPVYSHLIYDVIPDGDKTVVQPDILILEGLNVLQSGMDYPHDPHHVFVSDFVDFSIYVDAPEDLLQTWYINRFLKLREGAFTDPDSYFHGYAKLTKEEAIKTAMTIWKEMNSVNLKQNILPTRERASLILTKSANHIVEEVRLRK

SEQ ID NO: 173 - DNA, 978 bp, Artificial Sequence
  Engineered variant of Pantothenate Kinase from Escherichia coli
atgcaccatcatcatcatcatggcggtagcggcagcatcaaagagcagaccgagatgaccccgtacctgcaactggaccgtaaccaatgggcggcggtgcgtgatagtaacccgatgaccctgagcgaggacgaaatcgcgcgtctgaagggtattaacgaagatctgagcctggaggaagtggcggaagtctacctgccgctgagccgtgttctgaacttctatattagcagcaacctgcgtcgtcaggcgcagctggaacagtttctgggtaccaatggccagcgtatcccgtatatcattagcattgcgggtagcgtggcggtcggcaaaagcacctttgcgcgtgtgctgcaggcgctgctgagccgttggccggagcatcgtcgtgttgaacatatcactaccgacggcttcctgctgccgaaccaagtgctgaaggagcgtggtctgatggggaaaaagggtttcccggaaagctacgatatgcaccgtctgatgaaatttgttaaagacctgaagagcggtgtgccgaacgttaccgcgccggtgtacagccacctgatctatgatgttatcccggacggcgataaaaccgtggttcagccggacatcctgattctggagggtctgaacgtgctgcaaagcggcatggactatccgcacgatccgcaccacgtgtttgttagcgacttcgtggattttagcatctacgttgacgcgccggaggatctgctgcagacctggtacattaaccgtttcctgaaactgcgtgagggtgcgttcaccgacccggatagctactttcacgggtatgcgaaactgaccaaggaagaggcgatcaaaaccgcgatgaccatttggaaggagatgaacagcgtgaacctgaagcaaaacattctgccgacccgtgaacgtgcgagcctgattttgaccaaaagtgcaaaccacatcgtggaggaagtttgtttgcgtaag

SEQ ID NO: 174 - protein, 326 aa, Artificial Sequence
  Engineered variant of Pantothenate Kinase from Escherichia coli
MHHHHHHGGSGSIKEQTEMTPYLQLDRNQWAAVRDSNPMTLSEDEIARLKGINEDLSLEEVAEVYLPLSRVLNFYISSNLRRQAQLEQFLGTNGQRIPYIISIAGSVAVGKSTFARVLQALLSRWPEHRRVEHITTDGFLLPNQVLKERGLMGKKGFPESYDMHRLMKFVKDLKSGVPNVTAPVYSHLIYDVIPDGDKTVVQPDILILEGLNVLQSGMDYPHDPHHVFVSDFVDFSIYVDAPEDLLQTWYINRFLKLREGAFTDPDSYFHGYAKLTKEEAIKTAMTIWKEMNSVNLKQNILPTRERASLILTKSANHIVEEVCLRK

SEQ ID NO: 175 - DNA, 978 bp, Artificial Sequence
  Engineered variant of Pantothenate Kinase from Escherichia coli
atgcaccatcatcatcatcatggcggtagcggcagcatcaaagagcagaccgagatgaccccgtacctgcaactggaccgtaaccaatgggcggcggtgcgtgatagtaacccgatgaccctgagcgaggacgaaatcgcgcgtctgaagggtattaacgaagatctgagcctggaggaagtggcggaagtctacctgccgctgagccgtgttctgaacttctatattagcagcaacctgcgtcgtcaggcgcagctggaacagtttctgggtaccaatggccagcgtatcccgtatatcattagcattgcgggtagcgtggcggttggcaaaagcacctttgcgcgtgtgctgcaggcgctgctgagccgttggccggagcatcgtcgtgttgaacatatcagcaccgacggcttcctgcatccgaaccaagtgctgaaggagcgtggtctgatggggaaaaagggtttcccggaaagctacgatatgcaccgtctgatgaaatttgttaaagacctgaagagcggtgtgccgaacgttaccgcgccggtgtacagccacctgatctatgatgttattccggacggcgataaaaccgtggttcagccggacatcctgattctggagggtctgaacgtgctgcaaagcggcatggactatccgcacgatccgcaccacgtgtttgttagcgacttcgtggattttagcatcttcgttgacgcgccggaggatctgctgcagacgtggtacattaaccgtttcctgaaactgcgtgagggtgcgttcaccgacccggatagctactttcacgggtatgcgaaactgaccaaggaagaggcgatcaaaaccgcgatgaccatttggaaggagaagaacagcgtgaacctgaagcaaaacattctgccgacccgtgaacgtgcgagcctgattttgaccaaaagtgcaaaccacatcgtggaggaagttcgtctgcgtaag

SEQ ID NO: 176 - protein, 326 aa, Artificial Sequence
  Engineered variant of Pantothenate Kinase from Escherichia coli
MHHHHHHGGSGSIKEQTEMTPYLQLDRNQWAAVRDSNPMTLSEDEIARLKGINEDLSLEEVAEVYLPLSRVLNFYISSNLRRQAQLEQFLGTNGQRIPYIISIAGSVAVGKSTFARVLQALLSRWPEHRRVEHISTDGFLHPNQVLKERGLMGKKGFPESYDMHRLMKFVKDLKSGVPNVTAPVYSHLIYDVIPDGDKTVVQPDILILEGLNVLQSGMDYPHDPHHVFVSDFVDFSIFVDAPEDLLQTWYINRFLKLREGAFTDPDSYFHGYAKLTKEEAIKTAMTIWKEKNSVNLKQNILPTRERASLILTKSANHIVEEVRLRK

SEQ ID NO: 177 - DNA, 978 bp, Artificial Sequence
  Engineered variant of Pantothenate Kinase from Escherichia coli
atgcaccatcatcatcatcatggcggtagcggcagcatcaaagagcagaccgagatgaccccgtacctgcaactggaccgtaaccaatgggcggcggtgcgtgatagtaacccgatgaccctgagcgaggacgaaatcgcgcgtctgaagggtattaacgaagatctgagcctggaggaagtggcggaagtctacctgccgctgagccgtgttctgaacttctatattagcagcaacctgcgtcgtcaggcgcagctggaacagtttctgggtaccaatggccagcgtatcccgtatatcattagcattgcgggtagcgtggcggtcggcaaaagcacctttgcgcgtgtgctgcaggcgctgctgagccgttggccggagcatcgtcgtgttgaacatatcaccaccgacggcttcctgctgccgaaccaagtgctgaaggagcgtggtctgatggggaaaaagggtttcccggaaagctacgatatgcaccgtctgatgaaatttgttaaagacctgaagagcggtgtgccgaacgttaccgcgccggtgtacagccacctgatctatgatgttattccggacggcgataaaaccgtggttcagccggacatcctgattctggagggtctgaacgtgctgcaaagcggcatggattatccgcacgatccgcaccacgtgtttgttagcgacttcgtggattttagcatctacgttgacgcgccggaggatctgctgcagacctggtacctgaaccgtttcctgaaactgcgtgagggtgcgttcaccgacccggatagctactttcacgggtatgcgaaactgaccaaggaagaggcgatcaaaaccgcgatgaccatttggaaggagatgaacagcgtgaacctgaagcaaaacattctgccgacccgtgaacgtgcgagcctgattttgaccaaaagtgcaaaccacatcgtggaggaagttcgtctgcgtaag

SEQ ID NO: 178 - protein, 326 aa, Artificial Sequence
  Engineered variant of Pantothenate Kinase from Escherichia coli
MHHHHHHGGSGSIKEQTEMTPYLQLDRNQWAAVRDSNPMTLSEDEIARLKGINEDLSLEEVAEVYLPLSRVLNFYISSNLRRQAQLEQFLGTNGQRIPYIISIAGSVAVGKSTFARVLQALLSRWPEHRRVEHITTDGFLLPNQVLKERGLMGKKGFPESYDMHRLMKFVKDLKSGVPNVTAPVYSHLIYDVIPDGDKTVVQPDILILEGLNVLQSGMDYPHDPHHVFVSDFVDFSIYVDAPEDLLQTWYLNRFLKLREGAFTDPDSYFHGYAKLTKEEAIKTAMTIWKEMNSVNLKQNILPTRERASLILTKSANHIVEEVRLRK

SEQ ID NO: 179 - DNA, 978 bp, Artificial Sequence
  Engineered variant of Pantothenate Kinase from Escherichia coli
atgcaccatcatcatcatcatggcggtagcggcagcatcaaagagcagaccgagatgaccccgtacctgcaactggaccgtaaccaatgggcggcggtgcgtgatagtaacccgatgaccctgagcgaggacgaaatcgcgcgtctgaagggtattaacgaagatctgagcctggaggaagtggcggaagtctacctgccgctgagccgtgttctgaacttctatattagcagctatctgcgtcgtcaggcgcagctggaacagtttctgggtaccaatggccagcgtatcccgtatatcattagcattgcgggtagcgtggcggttggcaaaagcacctttgcgcgtgtgctgcaggcgctgctgagccgttggccggagcatcgtcgtgttgaacatatcaccaccgacggcttcctgcacccgaaccaagtgctgaaggagcgtggtctgatggggaaaaagggtttcccggaaagctacgatatgcaccgtctgatgaaatttgttaaagacctgaagagcggtgtgccgaacgttaccgcgccggtgtacagccacctgatctatgatgttattccggacggcgataaaaccgtggttcagccggacatcctgattctggagggtctgaacgtgctgcaaagcggcatggactatccgcacgatccgcaccacgtgtttgttagcgacttcgtggattttagcatctacgttgacgcgccggaggatctgctgcagacctggtacattaaccgtttcctgaaactgcgtgagggtgcgttcaccgacccggatagctactttcacgggtatgcgaaactgaccaaggaagaggcgatcaaaaccgcgatgaccatttggaaggagatgaacagcgtgaacctgaagcaaaacattctgccgacccgtgaacgtgcgagcctgattctgaccaaaagtgcaaaccacatcgtggaggaagttcgtctgcgtaag

SEQ ID NO: 180 - protein, 326 aa, Artificial Sequence
  Engineered variant of Pantothenate Kinase from Escherichia coli
MHHHHHHGGSGSIKEQTEMTPYLQLDRNQWAAVRDSNPMTLSEDEIARLKGINEDLSLEEVAEVYLPLSRVLNFYISSYLRRQAQLEQFLGTNGQRIPYIISIAGSVAVGKSTFARVLQALLSRWPEHRRVEHITTDGFLHPNQVLKERGLMGKKGFPESYDMHRLMKFVKDLKSGVPNVTAPVYSHLIYDVIPDGDKTVVQPDILILEGLNVLQSGMDYPHDPHHVFVSDFVDFSIYVDAPEDLLQTWYINRFLKLREGAFTDPDSYFHGYAKLTKEEAIKTAMTIWKEMNSVNLKQNILPTRERASLILTKSANHIVEEVRLRK

SEQ ID NO: 181 - DNA, 978 bp, Artificial Sequence
  Engineered variant of Pantothenate Kinase from Escherichia coli
atgcaccatcatcatcatcatggcggtagcggcagcatcaaagagcagaccgagatgaccccgtacctgcaactggaccgtaaccaatgggcggcggtgcgtgatagtaacccgatgaccctgagcgaggacgaaatcgcgcgtctgaagggtattaacgaagatctgagcctggaggaagtggcggaagtctacctgccgctgagccgtgttctgaacttctatattagcagcaacctgcgtcgtcaggcgcagctggaacagtttctgggtaccaatggccagcgtatcccgtatatcattagcattgcgggtagcgtggcggtcggcaaaagcacctttgcgcgtgtgctgcaggcgctgctgagccgttggccggagcatcgtcgtgttgaacatatcaccaccgacggcttcctgcacccgaaccaagtgctgaaggagcgtggtctgatggggaaaaagggtttcccggaaagctacgatatgcaccgtctgatgaaatttgttaaagacctgaagagcggtgtgccgaacgttaccgcgccggtgtacagccacctgatctatgatgttatcccggacggcgataaaaccgtggttcagccggacatcctgattctggagggtctgaacgtgctgcaaagcggcatggattatccgcacgatccgcaccacgtgtttgttagcgacttcgtggattttagcatctacgttgacgcgccggaggatctgctgcagacctggtacctgaaccgtttcctgaaactgcgtgagggtgcgttcaccgacccggatagctactttcacgggtatgcgaaactgaccaaggaagaggcgatcaaaaccgcgatgaccatttggaaggagatgaacagcgtgaacctgaagcaaaacattctgccgacccgtgaacgtgcgagcctgattttgaccaaaagtgcaaaccacatcgtggaggaagttcgtctgcgtaag

SEQ ID NO: 182 - protein, 326 aa, Artificial Sequence; identical to SEQ ID NO: 14
  Engineered variant of Pantothenate Kinase from Escherichia coli

SEQ ID NO: 183 - DNA, 978 bp, Artificial Sequence
  Engineered variant of Pantothenate Kinase from Escherichia coli
atgcaccatcatcatcatcatggcggtagcggcagcatcaaagagcagaccgagatgaccccgtacctgcaactggaccgtaaccaatgggcggcggtgcgtgatagtaacccgatgaccctgagcgaggacgaaatcgcgcgtctgaagggtattaacgaagatctgagcctggaggaagtggcggaagtctacctgccgctgagccgtgttctgaacttctatattagcagcaacctgcgtcgtcaggcgcagctggaacagtttctgggtaccaattcgcagcgtatcccgtatatcattagcattgcgggtagcgtggcggttggcaaaagcacctttgcgcgtgtgctgcaggcgctgctgagccgttggccggagcatcgtcgtgttgaacatatcaccaccgacggcttcctgcacccgaaccaagtgctgaaggagcgtggtctgatggggaaaaagggtttcccggaaagctacgatatgcaccgtctgatgaaatttgttaaagacctgaagagcggtgtgccgaacgttaccgcgccggtgtacagccacctgatctatgatgttattccggacggcgataaaaccgtggttcagccggacatcctgattctggagggtctgaacgtgctgcaaagcggcatggactatccgcacgatccgcaccacgtgtttgttagcgacttcgtggattttagcatctacgttgacgcgccggaggatctgctgcagacctggtacattaaccgtttcctgaaactgcgtgagggtgcgttcaccgacccggatagctactttcacgggtatgcgaaactgaccaaggaagaggcgatcaaaaccgcgatgaccatttggaaggagatgaacagcgtgaacctgaagcaaaacattctgccgacccgtgaacgtgcgagcctgattctgaccaaaagtgcaaaccacatcgtggaggaagttcgtctgcgtaag

SEQ ID NO: 184 - protein, 326 aa, Artificial Sequence
  Engineered variant of Pantothenate Kinase from Escherichia coli
MHHHHHHGGSGSIKEQTEMTPYLQLDRNQWAAVRDSNPMTLSEDEIARLKGINEDLSLEEVAEVYLPLSRVLNFYISSNLRRQAQLEQFLGTNSQRIPYIISIAGSVAVGKSTFARVLQALLSRWPEHRRVEHITTDGFLHPNQVLKERGLMGKKGFPESYDMHRLMKFVKDLKSGVPNVTAPVYSHLIYDVIPDGDKTVVQPDILILEGLNVLQSGMDYPHDPHHVFVSDFVDFSIYVDAPEDLLQTWYINRFLKLREGAFTDPDSYFHGYAKLTKEEAIKTAMTIWKEMNSVNLKQNILPTRERASLILTKSANHIVEEVRLRK

SEQ ID NO: 185 - DNA, 978 bp, Artificial Sequence
  Engineered variant of Pantothenate Kinase from Escherichia coli
atgcaccatcatcatcatcatggcggtagcggcagcatcaaagagcagaccgagatgaccccgtacctgcaactggaccgtaaccaatgggcggcggtgcgtgatagtaacccgatgaccctgagcgaggacgaaatcgcgcgtctgaagggtattaacgaagatctgagcctggaggaagtggcggaagtctacctgccgctgagccgtgttctgaacttctatattagcagcaacctgcgtcgtcaggcgcagctggaacagtttctgggtaccaatggccagcgtatcccgtatatcattagcattgcgggtagcgtggcggttggcaaaagcacctttgcgcgtgtgctgcaggcgctgctgagccgttggccggagcatcgtcgtgttgaacatatcaccaccgacggcttcctgcacccgaaccaagtgctgaaggagcgtggtctgatggggaaaaagggtttcccggaaagctacgatatgcaccgtctgatgaaatttgttaaagacctgaagagcggtgtgccgaacgttaccgcgccggtgtacagccacctgatctatgatgttattccggacggcgataaaaccgtggttcagccggacatcctgattctggagggtctgaacgtgctgcaaagcggcatggactatccgcacgatccgtatcacgtgtttgttagcgacttcgtggattttagcatctacgttgacgcgccggaggatctgctgcagacctggtacattaaccgtttcctgaaactgcgtgagggtgcgttcaccgacccggatagctactttcacgggtatgcgaaactgaccaaggaagaggcgatcaaaaccgcgatgaccatttggaaggagatgaacagcgtgaacctgaagcaaaacattctgccgacccgtgaacgtgcgagcctgattctgaccaaaagtgcaaaccacatcgtggaggaagttcgtctgcgtaag

SEQ ID NO: 186 - protein, 326 aa, Artificial Sequence
  Engineered variant of Pantothenate Kinase from Escherichia coli
MHHHHHHGGSGSIKEQTEMTPYLQLDRNQWAAVRDSNPMTLSEDEIARLKGINEDLSLEEVAEVYLPLSRVLNFYISSNLRRQAQLEQFLGTNGQRIPYIISIAGSVAVGKSTFARVLQALLSRWPEHRRVEHITTDGFLHPNQVLKERGLMGKKGFPESYDMHRLMKFVKDLKSGVPNVTAPVYSHLIYDVIPDGDKTVVQPDILILEGLNVLQSGMDYPHDPYHVFVSDFVDFSIYVDAPEDLLQTWYINRFLKLREGAFTDPDSYFHGYAKLTKEEAIKTAMTIWKEMNSVNLKQNILPTRERASLILTKSANHIVEEVRLRK

SEQ ID NO: 187 - DNA, 978 bp, Artificial Sequence
  Engineered variant of Pantothenate Kinase from Escherichia coli
atgcaccatcatcatcatcatggcggtagcggcagcatcaaagagcagaccgagatgaccccgtacctgcaactggaccgtaaccaatgggcggcggtgcgtgatagtaacccgatgaccctgagcgaggacgaaatcgcgcgtctgaagggtattaacgaagatctgagcctggaggaagtggcggaagtctacctgccgctgagccgtgttctgaacttctatattagcagcaacctgcgtcgtcaggcgcagctggaacagtttctgggtaccaatggccagcgtatcccgtatatcattagcgttgcgggtagcgtggcggttggcaaaagcacctttgcgcgtgtgctgcaggcgctgctgagccgttggccggagcatcgtcgtgttgaacatatcagcaccgacggcttcctgcatccgaaccaagtgctgaaggagcgtggtctgatggggaaaaagggtttcccggaaagctacgatatgcaccgtctgatgaaatttgttaaagacctgaagagcggtgtgccgaacgttaccgcgccggtgtacagccacctgatctatgatgttattccggacggcgataaaaccgtggttcagccggacatcctgattctggagggtctgaacgtgctgcaaagcggcatggactatccgcacgatccgcaccacgtgtttgttagcgacttcgtggattttagcatctacgttgacgcgccggaggatctgctgcagacctggtacattaaccgtttcctgaaactgcgtgagggtgcgttcaccgacccggatagctactttcacgggtatgcgaaactgaccaaggaagaggcgatcaaaaccgcgatgaccatttggaaggagaagaacagcgtgaacctgaagcaaaacattctgccgacccgtgaacgtgcgagcctgattttgaccaaaagtgcaaaccacatcgtggaggaagttcgtctgcgtaag

SEQ ID NO: 188 - protein, 326 aa, Artificial Sequence
  Engineered variant of Pantothenate Kinase from Escherichia coli
MHHHHHHGGSGSIKEQTEMTPYLQLDRNQWAAVRDSNPMTLSEDEIARLKGINEDLSLEEVAEVYLPLSRVLNFYISSNLRRQAQLEQFLGTNGQRIPYIISVAGSVAVGKSTFARVLQALLSRWPEHRRVEHISTDGFLHPNQVLKERGLMGKKGFPESYDMHRLMKFVKDLKSGVPNVTAPVYSHLIYDVIPDGDKTVVQPDILILEGLNVLQSGMDYPHDPHHVFVSDFVDFSIYVDAPEDLLQTWYINRFLKLREGAFTDPDSYFHGYAKLTKEEAIKTAMTIWKEKNSVNLKQNILPTRERASLILTKSANHIVEEVRLRK

SEQ ID NO: 189 - DNA, 978 bp, Artificial Sequence
  Engineered variant of Pantothenate Kinase from Escherichia coli
atgcaccatcatcatcatcatggcggtagcggcagcatcaaagagcagaccgagatgaccccgtacctgcaactggaccgtaaccaatgggcggcggtgcgtgatagtaacccgatgaccctgagcgaggacgaaatcgcgcgtctgaagggtattaacgaagatctgagcctggaggaagtggcggaagtctacctgccgctgagccgtgttctgaacttctatattagcagcaacctgcgtcgtcaggcgcagctggaacagtttctgggtaccaatggccagcgtatcccgtatatcattagcattgcgggtagcgtggcggttggcaaaagcacctttgcgcgtgtgctgcaggcgctgctgagccgttggccggagcatcgtcgtgttgaacatatcaccaccgacggcttcctgcacccgaaccaagtgctgaaggagcgtggtctgatggggaaaaagggtttcccggaaagctacgatatgcaccgtctgatgaaatttgttaaagacctgaagagcggtgtgccgaacgttaccgcgccggtgtacagccacctgatctatgatgttattccggacggcgataaaaccgtggttcagccggacatcctgattctggagggtctgaacgtgctgcaaagcggcatggactatccgcacgatccgcaccacgtgtttgttagcgacttctgtgattttagcatctacgttgacgcgccggaggatctgctgcagacctggtacattaaccgtttcctgaaactgcgtgagggtgcgttcaccgacccggatagctactttcacgggtatgcgaaactgaccaaggaagaggcgatcaaaaccgcgatgaccatttggaaggagatgaacagcgtgaacctgaagcaaaacattctgccgacccgtgaacgtgcgagcctgattctgaccaaaagtgcaaaccacatcgtggaggaagttcgtctgcgtaag

SEQ ID NO: 190 - protein, 326 aa, Artificial Sequence
  Engineered variant of Pantothenate Kinase from Escherichia coli
MHHHHHHGGSGSIKEQTEMTPYLQLDRNQWAAVRDSNPMTLSEDEIARLKGINEDLSLEEVAEVYLPLSRVLNFYISSNLRRQAQLEQFLGTNGQRIPYIISIAGSVAVGKSTFARVLQALLSRWPEHRRVEHITTDGFLHPNQVLKERGLMGKKGFPESYDMHRLMKFVKDLKSGVPNVTAPVYSHLIYDVIPDGDKTVVQPDILILEGLNVLQSGMDYPHDPHHVFVSDFCDFSIYVDAPEDLLQTWYINRFLKLREGAFTDPDSYFHGYAKLTKEEAIKTAMTIWKEMNSVNLKQNILPTRERASLILTKSANHIVEEVRLRK

SEQ ID NO: 191 - DNA, 978 bp, Artificial Sequence
  Engineered variant of Pantothenate Kinase from Escherichia coli
atgcaccatcatcatcatcatggcggtagcggcagcatcaaagagcagaccgagatgaccccgtacctgcaactggaccgtaaccaatgggcggcggtgcgtgatagtaacccgatgaccctgagcgaggacgaaatcgcgcgtctgaagggtattaacgaagatctgagcctggaggaagtggcggaagtctacctgccgctgagccgtgttctgaacttctatattagcagcaacgagcgtcgtcaggcgcagctggaacagtttctgggtaccaatggccagcgtatcccgtatatcattagcattgcgggtagcgtggcggttggcaaaagcacctttgcgcgtgtgctgcaggcgctgctgagccgttggccggagcatcgtcgtgttgaacatatcaccaccgacggcttcctgcacccgaaccaagtgctgaaggagcgtggtctgatggggaaaaagggtttcccggaaagctacgatatgcaccgtctgatgaaatttgttaaagacctgaagagcggtgtgccgaacgttaccgcgccggtgtacagccacctgatctatgatgttattccggacggcgataaaaccgtggttcagccggacatcctgattctggagggtctgaacgtgctgcaaagcggcatggactatccgcacgatccgcaccacgtgtttgttagcgacttcgtggattttagcatctacgttgacgcgccggaggatctgctgcagacctggtacattaaccgtttcctgaaactgcgtgagggtgcgttcaccgacccggatagctactttcacgggtatgcgaaactgaccaaggaagaggcgatcaaaaccgcgatgaccatttggaaggagatgaacagcgtgaacctgaagcaaaacattctgccgacccgtgaacgtgcgagcctgattctgaccaaaagtgcaaaccacatcgtggaggaagttcgtctgcgtaag

SEQ ID NO: 192 - protein, 326 aa, Artificial Sequence
  Engineered variant of Pantothenate Kinase from Escherichia coli
MHHHHHHGGSGSIKEQTEMTPYLQLDRNQWAAVRDSNPMTLSEDEIARLKGINEDLSLEEVAEVYLPLSRVLNFYISSNERRQAQLEQFLGTNGQRIPYIISIAGSVAVGKSTFARVLQALLSRWPEHRRVEHITTDGFLHPNQVLKERGLMGKKGFPESYDMHRLMKFVKDLKSGVPNVTAPVYSHLIYDVIPDGDKTVVQPDILILEGLNVLQSGMDYPHDPHHVFVSDFVDFSIYVDAPEDLLQTWYINRFLKLREGAFTDPDSYFHGYAKLTKEEAIKTAMTIWKEMNSVNLKQNILPTRERASLILTKSANHIVEEVRLRK

SEQ ID NO: 193 - DNA, 978 bp, Artificial Sequence
  Engineered variant of Pantothenate Kinase from Escherichia coli
atgcaccatcatcatcatcatggcggtagcggcagcatcaaagagcagaccgagatgaccccgtacctgcaactggaccgtaaccaatgggcggcggtgcgtgatagtaacccgatgaccctgagcgaggacgaaatcgcgcgtctgaagggtattaacgaagatctgagcctggaggaagtggcggaagtctacctgccgctgagccgtgttctgaacttctatattagcagcaacctgcgtcgtcaggcgcagctggaacagtttctgggtaccaatggcgggcgtatcccgtatatcattagcattgcgggtagcgtggcggttggcaaaagcacctttgcgcgtgtgctgcaggcgctgctgagccgttggccggagcatcgtcgtgttgaacatatcaccaccgacggcttcctgcacccgaaccaagtgctgaaggagcgtggtctgatggggaaaaagggtttcccggaaagctacgatatgcaccgtctgatgaaatttgttaaagacctgaagagcggtgtgccgaacgttaccgcgccggtgtacagccacctgatctatgatgttattccggacggcgataaaaccgtggttcagccggacatcctgattctggagggtctgaacgtgctgcaaagcggcatggactatccgcacgatccgcaccacgtgtttgttagcgacttcgtggattttagcatctacgttgacgcgccggaggatctgctgcagacctggtacattaaccgtttcctgaaactgcgtgagggtgcgttcaccgacccggatagctactttcacgggtatgcgaaactgaccaaggaagaggcgatcaaaaccgcgatgaccatttggaaggagatgaacagcgtgaacctgaagcaaaacattctgccgacccgtgaacgtgcgagcctgattctgaccaaaagtgcaaaccacatcgtggaggaagttcgtctgcgtaag

SEQ ID NO: 194 - protein, 326 aa, Artificial Sequence
  Engineered variant of Pantothenate Kinase from Escherichia coli
MHHHHHHGGSGSIKEQTEMTPYLQLDRNQWAAVRDSNPMTLSEDEIARLKGINEDLSLEEVAEVYLPLSRVLNFYISSNLRRQAQLEQFLGTNGGRIPYIISIAGSVAVGKSTFARVLQALLSRWPEHRRVEHITTDGFLHPNQVLKERGLMGKKGFPESYDMHRLMKFVKDLKSGVPNVTAPVYSHLIYDVIPDGDKTVVQPDILILEGLNVLQSGMDYPHDPHHVFVSDFVDFSIYVDAPEDLLQTWYINRFLKLREGAFTDPDSYFHGYAKLTKEEAIKTAMTIWKEMNSVNLKQNILPTRERASLILTKSANHIVEEVRLRK

SEQ ID NO: 195 - DNA, 978 bp, Artificial Sequence
  Engineered variant of Pantothenate Kinase from Escherichia coli
atgcaccatcatcatcatcatggcggtagcggcagcatcaaagagcagaccgagatgaccccgtacctgcaactggaccgtaaccaatgggcggcggtgcgtgatagtaacccgatgaccctgagcgaggacgaaatcgcgcgtctgaagggtattaacgaagatctgagcctggaggaagtggcggaagtctacctgccgctgagccgtgttctgaacttctatattagcagcaacctgcgtcgtcaggcgcagctggaacagtttctgggtaccaatggccagcgtatcccgtatatcattagcattgcgggtagcgtggcggttggcaaaagcacctttgcgcgtgtgctgcaggcgctgctgagccgttggccggagcatcgtcgtgttgaacatatcaccaccgacggcttcctgcacccgaaccaagtgctgaaggagcgtggtctgatggggaaaaagggtttcccggaaagctacgatatgccgcgtctgatgaaatttgttaaagacctgaagagcggtgtgccgaacgttaccgcgccggtgtacagccacctgatctatgatgttattccggacggcgataaaaccgtggttcagccggacatcctgattctggagggtctgaacgtgctgcaaagcggcatggactatccgcacgatccgcaccacgtgtttgttagcgacttcgtggattttagcatctacgttgacgcgccggaggatctgctgcagacctggtacattaaccgtttcctgaaactgcgtgagggtgcgttcaccgacccggatagctactttcacgggtatgcgaaactgaccaaggaagaggcgatcaaaaccgcgatgaccatttggaaggagatgaacagcgtgaacctgaagcaaaacattctgccgacccgtgaacgtgcgagcctgattctgaccaaaagtgcaaaccacatcgtggaggaagttcgtctgcgtaag

SEQ ID NO: 196 - protein, 326 aa, Artificial Sequence
  Engineered variant of Pantothenate Kinase from Escherichia coli
MHHHHHHGGSGSIKEQTEMTPYLQLDRNQWAAVRDSNPMTLSEDEIARLKGINEDLSLEEVAEVYLPLSRVLNFYISSNLRRQAQLEQFLGTNGQRIPYIISIAGSVAVGKSTFARVLQALLSRWPEHRRVEHITTDGFLHPNQVLKERGLMGKKGFPESYDMPRLMKFVKDLKSGVPNVTAPVYSHLIYDVIPDGDKTVVQPDILILEGLNVLQSGMDYPHDPHHVFVSDFVDFSIYVDAPEDLLQTWYINRFLKLREGAFTDPDSYFHGYAKLTKEEAIKTAMTIWKEMNSVNLKQNILPTRERASLILTKSANHIVEEVRLRK

SEQ ID NO: 197 - DNA, 978 bp, Artificial Sequence
  Engineered variant of Pantothenate Kinase from Escherichia coli
atgcaccatcatcatcatcatggcggtagcggcagcatcaaagagcagaccgagatgaccccgtacctgcaactggaccgtaaccaatgggcggcggtgcgtgatagtaacccgatgaccctgagcgaggacgaaatcgcgcgtctgaagggtattaacgaagatctgagcctggaggaagtggcggaagtctacctgccgctgagccgtgttctgaacttctatattagcagcaacctgcgtcgtcaggcgcagctggaacagtttctgggtaccaatggccagcgtatcccgtatatcattagcattgcgggtagcgtggcggtcggcaaaagcacctttgcgcgtgtgctgcaggcgctgctgagccgttggccggagcatcgtcgtgttgaacatatcaccaccgacggcttcctgcatccgaaccaagtgctgaaggagcgtggtctgatggggaaaaagggtttcccggaaagctacgatatgcaccgtctgatgaaatttgttaaagacctgaagagcggtgtgccgaacgttaccgcgccggtgtacagccacctgatctatgatgttattccggacggcgataaaaccgtggttcagccggacatcctgattctggagggtctgaacgtgctgcaaagcggcatggattatccgcacgatccgcaccacgtgtttgttagcgacttcgtggattttagcatctacgttgacgcgccggaggatctgctgcagacctggtacattaaccgtttcctgaaactgcgtgagggtgcgttcaccgacccggatagctactttcacgggtatgcgaaactgaccaaggaagaggcgatcaaaaccgcgatgaccatttggaaggagatgaacagcgtgaacctgaagcaaaacattctgccgacccgtgagcgtgcgagcctgattttgaccaaaagtgcaaaccacatcgtggaggaagtttgtctgcgtaag

SEQ ID NO: 198 - protein, 326 aa, Artificial Sequence
  Engineered variant of Pantothenate Kinase from Escherichia coli
MHHHHHHGGSGSIKEQTEMTPYLQLDRNQWAAVRDSNPMTLSEDEIARLKGINEDLSLEEVAEVYLPLSRVLNFYISSNLRRQAQLEQFLGTNGQRIPYIISIAGSVAVGKSTFARVLQALLSRWPEHRRVEHITTDGFLHPNQVLKERGLMGKKGFPESYDMHRLMKFVKDLKSGVPNVTAPVYSHLIYDVIPDGDKTVVQPDILILEGLNVLQSGMDYPHDPHHVFVSDFVDFSIYVDAPEDLLQTWYINRFLKLREGAFTDPDSYFHGYAKLTKEEAIKTAMTIWKEMNSVNLKQNILPTRERASLILTKSANHIVEEVCLRK

SEQ ID NO: 199 - DNA, 978 bp, Artificial Sequence
  Engineered variant of Pantothenate Kinase from Escherichia coli
atgcaccatcatcatcatcatggcggtagcggcagcatcaaagagcagaccgagatgaccccgtacctgcaactggaccgtaaccaatgggcggcggtgcgtgatagtaacccgatgaccctgagcgaggacgaaatcgcgcgtctgaagggtattaacgaagatctgagcctggaggaagtggcggaagtctacctgccgctgagccgtgttctgaacttctatattagcagcaacctgcgtcgtcaggcgcagctggaacagtttctgggtaccaatggccagcgtatcccgtatatcattagcgttgcgggtagcgtggcggttggcaaaagcacctttgcgcgtgtgctgcaggcgctgctgagccgttggccggagcatcgtcgtgttgaacatatcaccaccgacggcttcctgcatccgaaccaagtgctgaaggagcgtggtctgatggggaaaaagggtttcccggaaagctacgatatgcaccgtctgatgaaatttgttaaagacctgaagagcggtgtgccgaacgttaccgcgccggtgtacagccacctgatctatgatgttattccggacggcgataaaaccgtggttcagccggacatcctgattctggagggtctgaacgtgctgcaaggcggcatggactatccgcacgatccgcaccacgtgtttgttagcgacttcgtggattttagcatcttcgttgacgcgccggaggatctgctgcagacgtggtacattaaccgtttcctgaaactgcgtgagggtgcgttcaccgacccggatagctactttcacgggtatgcgaaactgaccaaggaagaggcgatcaaaaccgcgatgaccatttggaaggagatgaacagcgtgaacctgaagcaaaacattctgccgacccgtgaacgtgcgagcctgattttgaccaaaagtgcaaaccacatcgtggaggaagttcgtctgcgtaag

SEQ ID NO: 200 - protein, 326 aa, Artificial Sequence
  Engineered variant of Pantothenate Kinase from Escherichia coli
MHHHHHHGGSGSIKEQTEMTPYLQLDRNQWAAVRDSNPMTLSEDEIARLKGINEDLSLEEVAEVYLPLSRVLNFYISSNLRRQAQLEQFLGTNGQRIPYIISVAGSVAVGKSTFARVLQALLSRWPEHRRVEHITTDGFLHPNQVLKERGLMGKKGFPESYDMHRLMKFVKDLKSGVPNVTAPVYSHLIYDVIPDGDKTVVQPDILILEGLNVLQGGMDYPHDPHHVFVSDFVDFSIFVDAPEDLLQTWYINRFLKLREGAFTDPDSYFHGYAKLTKEEAIKTAMTIWKEMNSVNLKQNILPTRERASLILTKSANHIVEEVRLRK

SEQ ID NO: 201 - DNA, 978 bp, Artificial Sequence
  Engineered variant of Pantothenate Kinase from Escherichia coli
atgcaccatcatcatcatcatggcggtagcggcagcatcaaagagcagaccgagatgaccccgtacctgcaactggaccgtaaccaatgggcggcggtgcgtagtagtaacccgatgaccctgagcgaggacgaaatcgcgcgtctgaagggtattaacgaagatctgagcctggaggaagtggcggaagtctacctgccgctgagccgtgttctgaacttctatattagcagcaacctgcgtcgtcaggcgcagctggaacagtttctgggtaccaatggccagcgtatcccgtatatcattagcattgcgggtagcgtggcggttggcaaaagcacctttgcgcgtgtgctgcaggcgctgctgagccgttggccggagcatcgtcgtgttgaacatatcaccaccgacggcttcctgcacccgaaccaagtgctgaaggagcgtggtctgatggggaaaaagggtttcccggaaagctacgatatgcaccgtctgatgaaatttgttaaagacctgaagagcggtgtgccgaacgttaccgcgccggtgtacagccacctgatctatgatgttattccggacggcgataaaaccgtggttcagccggacatcctgattctggagggtctgaacgtgctgcaaagcggcatggactatccgcacgatccgcaccacgtgtttgttagcgacttcgtggattttagcatctacgttgacgcgccggaggatctgctgcagacctggtacattaaccgtttcctgaaactgcgtgagggtgcgttcaccgacccggatagctactttcacgggtatgcgaaactgaccaaggaagaggcgatcaaaaccgcgatgaccatttggaaggagatgaacagcgtgaacctgaagcaaaacattctgccgacccgtgaacgtgcgagcctgattctgaccaaaagtgcaaaccacatcgtggaggaagttcgtctgcgtaag

SEQ ID NO: 202 - protein, 326 aa, Artificial Sequence
  Engineered variant of Pantothenate Kinase from Escherichia coli
MHHHHHHGGSGSIKEQTEMTPYLQLDRNQWAAVRSSNPMTLSEDEIARLKGINEDLSLEEVAEVYLPLSRVLNFYISSNLRRQAQLEQFLGTNGQRIPYIISIAGSVAVGKSTFARVLQALLSRWPEHRRVEHITTDGFLHPNQVLKERGLMGKKGFPESYDMHRLMKFVKDLKSGVPNVTAPVYSHLIYDVIPDGDKTVVQPDILILEGLNVLQSGMDYPHDPHHVFVSDFVDFSIYVDAPEDLLQTWYINRFLKLREGAFTDPDSYFHGYAKLTKEEAIKTAMTIWKEMNSVNLKQNILPTRERASLILTKSANHIVEEVRLRK

SEQ ID NO: 203 - DNA, 978 bp, Artificial Sequence
  Engineered variant of Pantothenate Kinase from Escherichia coli
atgcaccatcatcatcatcatggcggtagcggcagcatcaaagagcagaccgagatgaccccgtacctgcaactggaccgtaaccaatgggcggcggtgcgtgatagtaacccgatgaccctgagcgaggacgaaatcgcgcgtctgaagggtattaacgaagatctgagcctggaggaagtggcggaagtctacctgccgctgagccgtgttctgaacttctatattagcagcaacctgcgtcgtcaggcgcagctggaacagtttctgggtaccaatggccagcgtatcccgtatatcattagcgttgcgggtagcgtggcggttggcaaaagcacctttgcgcgtgtgctgcaggcgctgctgagccgttggccggagcatcgtcgtgttgaacatatcaccaccgacggcttcctgcatccgaaccaagtgctgaaggagcgtggtctgatggggaaaaagggtttcccggaaagctacgatatgcaccgtctgatgaaatttgttaaagacctgaagagcggtgtgccgaacgttaccgcgccggtgtacagccacctgatctatgatgttattccggacggcgataaaaccgtggttcagccggacatcctgattctggagggtctgaacgtgctgcaaagcggcatggactatccgcacgatccgcaccacgtgtttgttagcgacttcgtggattttagcatctacgttgacgcgccggaggatctgctgcagacctggtacattaaccgtttcctgaaactgcgtgagggtgcgttcaccgacccggatagctactttcacgggtatgcgaaactgaccaaggaagaggcgatcaaaaccgcgatgaccatttggaaggagatgaacagcgtgaacctgaagcaaaacattctgccgacccgtgaacgtgcgagcctgattttgaccaaaagtgcaaaccacatcgtggaggaagttcgtttgcgtaag

SEQ ID NO: 204 - protein, 326 aa, Artificial Sequence; identical to SEQ ID NO: 20
  Engineered variant of Pantothenate Kinase from Escherichia coli

SEQ ID NO: 205 - DNA, 978 bp, Artificial Sequence
  Engineered variant of Pantothenate Kinase from Escherichia coli
atgcaccatcatcatcatcatggcggtagcggcagcatcaaagagcagaccgagatgaccccgtacctgcaactggaccgtaaccaatgggcggcggtgcgtgatagtaacccgatgaccctgagcgaggacgaaatcgcgcgtctgaagggtattaacgaagatctgagcctggaggaagtggcggaagtctacctgccgctgagccgtgttctgaacttctatattagcagcaacctgcgtcgtcaggcgcagctggaacagtttctgggtaccaatggccagcgtatcccgtatatcattagcattgcgggtagcgtggcggttggcaaaagcacctttgcgcgtgtgctgcagcttctgctgagccgttggccggagcatcgtcgtgttgaacatatcaccaccgacggcttcctgcacccgaaccaagtgctgaaggagcgtggtctgatggggaaaaagggtttcccggaaagctacgatatgcaccgtctgatgaaatttgttaaagacctgaagagcggtgtgccgaacgttaccgcgccggtgtacagccacctgatctatgatgttattccggacggcgataaaaccgtggttcagccggacatcctgattctggagggtctgaacgtgctgcaaagcggcatggactatccgcacgatccgcaccacgtgtttgttagcgacttcgtggattttagcatctacgttgacgcgccggaggatctgctgcagacctggtacattaaccgtttcctgaaactgcgtgagggtgcgttcaccgacccggatagctactttcacgggtatgcgaaactgaccaaggaagaggcgatcaaaaccgcgatgaccatttggaaggagatgaacagcgtgaacctgaagcaaaacattctgccgacccgtgaacgtgcgagcctgattctgaccaaaagtgcaaaccacatcgtggaggaagttcgtctgcgtaag

SEQ ID NO: 206 - protein, 326 aa, Artificial Sequence
  Engineered variant of Pantothenate Kinase from Escherichia coli
MHHHHHHGGSGSIKEQTEMTPYLQLDRNQWAAVRDSNPMTLSEDEIARLKGINEDLSLEEVAEVYLPLSRVLNFYISSNLRRQAQLEQFLGTNGQRIPYIISIAGSVAVGKSTFARVLQLLLSRWPEHRRVEHITTDGFLHPNQVLKERGLMGKKGFPESYDMHRLMKFVKDLKSGVPNVTAPVYSHLIYDVIPDGDKTVVQPDILILEGLNVLQSGMDYPHDPHHVFVSDFVDFSIYVDAPEDLLQTWYINRFLKLREGAFTDPDSYFHGYAKLTKEEAIKTAMTIWKEMNSVNLKQNILPTRERASLILTKSANHIVEEVRLRK

SEQ ID NO: 207 - DNA, 978 bp, Artificial Sequence
  Engineered variant of Pantothenate Kinase from Escherichia coli
atgcaccatcatcatcatcatggcggtagcggcagcatcaaagagcagaccgagatgaccccgtacctgcaactggaccgtaaccaatgggcggcggtgcgtgatagtaacccgatgaccctgagcgaggacgaaatcgcgcgtctgaagggtattaacgaagatctgagcctggaggaagtggcggaagtctacctgccgctgagccgtgttctgaacttctatgttagcagcaacctgcgtcgtcaggcgcagctggaacagtttctgggtaccaatggccagcgtatcccgtatatcattagcattgcgggtagcgtggcggttggcaaaagcacctttgcgcgtgtgctgcaggcgctgctgagccgttggccggagcatcgtcgtgttgaacatatcaccaccgacggcttcctgcacccgaaccaagtgctgaaggagcgtggtctgatggggaaaaagggtttcccggaaagctacgatatgcaccgtctgatgaaatttgttaaagacctgaagagcggtgtgccgaacgttaccgcgccggtgtacagccacctgatctatgatgttattccggacggcgataaaaccgtggttcagccggacatcctgattctggagggtctgaacgtgctgcaaagcggcatggactatccgcacgatccgcaccacgtgtttgttagcgacttcgtggattttagcatctacgttgacgcgccggaggatctgctgcagacctggtacattaaccgtttcctgaaactgcgtgagggtgcgttcaccgacccggatagctactttcacgggtatgcgaaactgaccaaggaagaggcgatcaaaaccgcgatgaccatttggaaggagatgaacagcgtgaacctgaagcaaaacattctgccgacccgtgaacgtgcgagcctgattctgaccaaaagtgcaaaccacatcgtggaggaagttcgtctgcgtaag

SEQ ID NO: 208 - protein, 326 aa, Artificial Sequence
  Engineered variant of Pantothenate Kinase from Escherichia coli
MHHHHHHGGSGSIKEQTEMTPYLQLDRNQWAAVRDSNPMTLSEDEIARLKGINEDLSLEEVAEVYLPLSRVLNFYVSSNLRRQAQLEQFLGTNGQRIPYIISIAGSVAVGKSTFARVLQALLSRWPEHRRVEHITTDGFLHPNQVLKERGLMGKKGFPESYDMHRLMKFVKDLKSGVPNVTAPVYSHLIYDVIPDGDKTVVQPDILILEGLNVLQSGMDYPHDPHHVFVSDFVDFSIYVDAPEDLLQTWYINRFLKLREGAFTDPDSYFHGYAKLTKEEAIKTAMTIWKEMNSVNLKQNILPTRERASLILTKSANHIVEEVRLRK

SEQ ID NO: 209 - DNA, 978 bp, Artificial Sequence
  Engineered variant of Pantothenate Kinase from Escherichia coli
atgcaccatcatcatcatcatggcggtagcggcagcatcaaagagcagaccgagatgaccccgtacctgcaactggcgcgtaaccaatgggcggcggtgcgtgatagtaacccgatgaccctgagcgaggacgaaatcgcgcgtctgaagggtattaacgaagatctgagcctggaggaagtggcggaagtctacctgccgctgagccgtgttctgaacttctatattagcagcaacctgcgtcgtcaggcgcagctggaacagtttctgggtaccaatggccagcgtatcccgtatatcattagcattgcgggtagcgtggcggttggcaaaagcacctttgcgcgtgtgctgcaggcgctgctgagccgttggccggagcatcgtcgtgttgaacatatcaccaccgacggcttcctgcacccgaaccaagtgctgaaggagcgtggtctgatggggaaaaagggtttcccggaaagctacgatatgcaccgtctgatgaaatttgttaaagacctgaagagcggtgtgccgaacgttaccgcgccggtgtacagccacctgatctatgatgttattccggacggcgataaaaccgtggttcagccggacatcctgattctggagggtctgaacgtgctgcaaagcggcatggactatccgcacgatccgcaccacgtgtttgttagcgacttcgtggattttagcatctacgttgacgcgccggaggatctgctgcagacctggtacattaaccgtttcctgaaactgcgtgagggtgcgttcaccgacccggatagctactttcacgggtatgcgaaactgaccaaggaagaggcgatcaaaaccgcgatgaccatttggaaggagatgaacagcgtgaacctgaagcaaaacattctgccgacccgtgaacgtgcgagcctgattctgaccaaaagtgcaaaccacatcgtggaggaagttcgtctgcgtaag

SEQ ID NO: 210 - protein, 326 aa, Artificial Sequence
  Engineered variant of Pantothenate Kinase from Escherichia coli
MHHHHHHGGSGSIKEQTEMTPYLQLARNQWAAVRDSNPMTLSEDEIARLKGINEDLSLEEVAEVYLPLSRVLNFYISSNLRRQAQLEQFLGTNGQRIPYIISIAGSVAVGKSTFARVLQALLSRWPEHRRVEHITTDGFLHPNQVLKERGLMGKKGFPESYDMHRLMKFVKDLKSGVPNVTAPVYSHLIYDVIPDGDKTVVQPDILILEGLNVLQSGMDYPHDPHHVFVSDFVDFSIYVDAPEDLLQTWYINRFLKLREGAFTDPDSYFHGYAKLTKEEAIKTAMTIWKEMNSVNLKQNILPTRERASLILTKSANHIVEEVRLRK

SEQ ID NO: 211 - DNA, 978 bp, Artificial Sequence
  Engineered variant of Pantothenate Kinase from Escherichia coli
atgcaccatcatcatcatcatggcggtagcggcagcatcaaagagcagaccgagatgaccccgtacctgcaactgactcgtaaccaatgggcggcggtgcgtgatagtaacccgatgaccctgagcgaggacgaaatcgcgcgtctgaagggtattaacgaagatctgagcctggaggaagtggcggaagtctacctgccgctgagccgtgttctgaacttctatattagcagcaacctgcgtcgtcaggcgcagctggaacagtttctgggtaccaatggccagcgtatcccgtatatcattagcattgcgggtagcgtggcggttggcaaaagcacctttgcgcgtgtgctgcaggcgctgctgagccgttggccggagcatcgtcgtgttgaacatatcaccaccgacggcttcctgcacccgaaccaagtgctgaaggagcgtggtctgatggggaaaaagggtttcccggaaagctacgatatgcaccgtctgatgaaatttgttaaagacctgaagagcggtgtgccgaacgttaccgcgccggtgtacagccacctgatctatgatgttattccggacggcgataaaaccgtggttcagccggacatcctgattctggagggtctgaacgtgctgcaaagcggcatggactatccgcacgatccgcaccacgtgtttgttagcgacttcgtggattttagcatctacgttgacgcgccggaggatctgctgcagacctggtacattaaccgtttcctgaaactgcgtgagggtgcgttcaccgacccggatagctactttcacgggtatgcgaaactgaccaaggaagaggcgatcaaaaccgcgatgaccatttggaaggagatgaacagcgtgaacctgaagcaaaacattctgccgacccgtgaacgtgcgagcctgattctgaccaaaagtgcaaaccacatcgtggaggaagttcgtctgcgtaag

SEQ ID NO: 212 - protein, 326 aa, Artificial Sequence
  Engineered variant of Pantothenate Kinase from Escherichia coli
MHHHHHHGGSGSIKEQTEMTPYLQLTRNQWAAVRDSNPMTLSEDEIARLKGINEDLSLEEVAEVYLPLSRVLNFYISSNLRRQAQLEQFLGTNGQRIPYIISIAGSVAVGKSTFARVLQALLSRWPEHRRVEHITTDGFLHPNQVLKERGLMGKKGFPESYDMHRLMKFVKDLKSGVPNVTAPVYSHLIYDVIPDGDKTVVQPDILILEGLNVLQSGMDYPHDPHHVFVSDFVDFSIYVDAPEDLLQTWYINRFLKLREGAFTDPDSYFHGYAKLTKEEAIKTAMTIWKEMNSVNLKQNILPTRERASLILTKSANHIVEEVRLRK

SEQ ID NO: 213 - DNA, 978 bp, Artificial Sequence
  Engineered variant of Pantothenate Kinase from Escherichia coli
atgcaccatcatcatcatcatggcggtagcggcagcatcaaagagcagaccgagatgaccccgtacctgcaactggaccgtaaccaatgggcggcggtgcgtcgcagtaacccgatgaccctgagcgaggacgaaatcgcgcgtctgaagggtattaacgaagatctgagcctggaggaagtggcggaagtctacctgccgctgagccgtgttctgaacttctatattagcagcaacctgcgtcgtcaggcgagtctggaacagtttctgggtaccaatggccagcgtatcccgtatatcattagcgttgcgggtagcgtggcggttggcaaaagcacctttgcgcgtgtgctgcaggcgctgctgagccgttggccggagcatcgtcgtgttgaacatatcagcaccgacggcttcctgctgccgaaccaagtcctgaaggagcgtggtctgatggggaaaaagggtttcccggaaagctacgatatgcaccgtctgatgaaatttgttaaagacctgaagagcggtgtgccgaacgttaccgcgccggtgtacagccacctgatctatgatgttattccggacggcgataaaaccgtggttcagccggacatcctgattctggagggtctgaacgtgctgcaaagcggctgcgactatccgcacgatccgtatcacgtgtttgttagcgacttcgtggattttagcatctacgttgacgcgccggaggatctgctgcagacctggtacattaaccgtttcctgaaactgcgtgagggtgcgttcaccgacccggatagctactttcacgggtatgcgaagctgaccaaggaagaggcgatcaaaaccgcgatgaccatttggaaggagatgaacagcgtgaacctgaagcaaaacattctgccgacccgtgaacgtgcgagcctgattttgaccaaaagtgcaaaccacatcgtggaggaagttcgtctgcgtaag

SEQ ID NO: 214 - protein, 326 aa, Artificial Sequence
  Engineered variant of Pantothenate Kinase from Escherichia coli
MHHHHHHGGSGSIKEQTEMTPYLQLDRNQWAAVRRSNPMTLSEDEIARLKGINEDLSLEEVAEVYLPLSRVLNFYISSNLRRQASLEQFLGTNGQRIPYIISVAGSVAVGKSTFARVLQALLSRWPEHRRVEHISTDGFLLPNQVLKERGLMGKKGFPESYDMHRLMKFVKDLKSGVPNVTAPVYSHLIYDVIPDGDKTVVQPDILILEGLNVLQSGCDYPHDPYHVFVSDFVDFSIYVDAPEDLLQTWYINRFLKLREGAFTDPDSYFHGYAKLTKEEAIKTAMTIWKEMNSVNLKQNILPTRERASLILTKSANHIVEEVRLRK

SEQ ID NO: 215 - DNA, 978 bp, Artificial Sequence
  Engineered variant of Pantothenate Kinase from Escherichia coli
atgcaccatcatcatcatcatggcggtagcggcagcatcaaagagcagaccgagatgaccccgtacctgcaactggaccgtaaccaatgggcggcggtgcgtcgcagtaacccgatgaccctgagcgaggacgaaatcgcgcgtctgaagggtattaacgaagatctgagcctggaggaagtggcggaagtctacctgccgctgagccgtgttctgaacttctatattagcagcaacctgcgtcgtcaggcgcagctggaacagtttctgggtaccaatggccagcgtatcccgtatatcattagcgttgcgggtagcgtggcggttggcaaaagcacctttgcgcgtgtgctgcaggcgctgctgagccgttggccggagcatcgtcgtgttgaacatatcagcaccgacggcttcctgctgccgaaccaagtgctgaaggagcgtggtctgatggggaaaaagggtttcccggaaagctacgatatgcaccgtctgatgaaatttgttaaagacctgaagagcggtgtgccgaacgttaccgcgccggtgtacagccacctgatctatgatgttattccggacggcgataaaaccgtggttcagccggacatcctgattctggagggtctgaacgtgctgcaaagcggctgcgactatccgcacgatccgcaccacgtgtttgttagcgacttcgtggattttagcatctacgttgacgcgccggaggatctgctgcagacctggtacattaaccgtttcctgaaactgcgtgagggtgcgttcaccgacccggatagctactttcacgggtatgcgaaactgaccaaggaagaggcgatcaaaaccgcgatgaccatttggaaggagatgaacagcgtgaacctgaagcaaaacattctgccgacccgtgaacgtgcggcgctgattttgaccaaaagtgcaaaccacatcgtggaggaagttcgtctgcgtaag

SEQ ID NO: 216 - protein, 326 aa, Artificial Sequence
  Engineered variant of Pantothenate Kinase from Escherichia coli
MHHHHHHGGSGSIKEQTEMTPYLQLDRNQWAAVRRSNPMTLSEDEIARLKGINEDLSLEEVAEVYLPLSRVLNFYISSNLRRQAQLEQFLGTNGQRIPYIISVAGSVAVGKSTFARVLQALLSRWPEHRRVEHISTDGFLLPNQVLKERGLMGKKGFPESYDMHRLMKFVKDLKSGVPNVTAPVYSHLIYDVIPDGDKTVVQPDILILEGLNVLQSGCDYPHDPHHVFVSDFVDFSIYVDAPEDLLQTWYINRFLKLREGAFTDPDSYFHGYAKLTKEEAIKTAMTIWKEMNSVNLKQNILPTRERAALILTKSANHIVEEVRLRK

SEQ ID NO: 217 - DNA, 978 bp, Artificial Sequence
  Engineered variant of Pantothenate Kinase from Escherichia coli
atgcaccatcatcatcatcatggcggtagcggcagcatcaaagagcagaccgagatgaccccgtacctgcaactggaccgtaaccaatgggcggcggtgcgtcgcagtaacccgatgaccctgagcgaggacgaaatcgcgcgtctgaagggtattaacgaagatctgagcctggaggaagtggcggaagtctacctgccgctgagccgtgttctgaacttctatattagcagcaacctgcgtcgtcaggcgcagctggaacagtttctgggtaccaatggccagcgtatcccgtatatcattagcgttgcgggtagcgtggcggttggcaaaagcacctttgcgcgtgtgctgcaggcgctgctgagccgttggccggagcatcgtcgtgttgaacatatcagcaccgacggcttcctgctgccgaaccaagtgctgaaggagcgtggtctgatggggaaaaagggtttcccggaaagctacgatatgcaccgtctgatgaaatttgttaaagacctgaagagcggtgtgccgaacgttaccgcgccggtgtacagccacctgatctatgatgttattccggacggcgttaaaaccgtggttcagccggacatcctgattctggagggtctgaacgtgctgcaaagcggcatggactatccgcacgatccgcaccacgtgtttgttagcgacttcgtggattttagcatctacgttgacgcgccggaggatctgctgcagacctggtacattaaccgtttcctgaaactgcgtgagggtgcgttcaccgacccggatagctactttcacgggtatgcggcactgaccaaggaagaggcgatcaaaaccgcgatgaccatttggaaggagatgaacagcgtgaacctgaagcaaaacattctgccgacccgtgaacgtgcgagcctgattttgaccaaaagtgcaaaccacatcgtggaggaagttcgtctgcgtaag

SEQ ID NO: 218 - protein, 326 aa, Artificial Sequence
  Engineered variant of Pantothenate Kinase from Escherichia coli
MHHHHHHGGSGSIKEQTEMTPYLQLDRNQWAAVRRSNPMTLSEDEIARLKGINEDLSLEEVAEVYLPLSRVLNFYISSNLRRQAQLEQFLGTNGQRIPYIISVAGSVAVGKSTFARVLQALLSRWPEHRRVEHISTDGFLLPNQVLKERGLMGKKGFPESYDMHRLMKFVKDLKSGVPNVTAPVYSHLIYDVIPDGVKTVVQPDILILEGLNVLQSGMDYPHDPHHVFVSDFVDFSIYVDAPEDLLQTWYINRFLKLREGAFTDPDSYFHGYAALTKEEAIKTAMTIWKEMNSVNLKQNILPTRERASLILTKSANHIVEEVRLRK

SEQ ID NO: 219 - DNA, 978 bp, Artificial Sequence
  Engineered variant of Pantothenate Kinase from Escherichia coli
atgcaccatcatcatcatcatggcggtagcggcagcatcaaagagcagaccgagatgaccccgtacctgcaactggaccgtaaccaatgggcggcggtgcgtcgcagtaacccgatgaccctgagcgaggacgaaatcgcgcgtctgaagggtattaacgaagatctgagcctggaggaagtggcggaagtctacctgccgctgagccgtgttctgaacctgtatatttcgagcaacctgcgtcgtcaggcgcagctggaacagtttctgggtaccaatggccagcgtatcccgtatatcattagcgttgcgggtagcgtggcggttggcaaaagcacctttgcgcgtgtgctgcaggcgctgctgagccgttggccggagcatcgtcgtgttgaacatatcagcaccgacggcttcctgctgccgaaccaagtgctgaaggagcgtggtctgatggggaaaaagggtttcccggaaagctacgatatgcaccgtctgatgaaatttgttaaagacctgaagagcggtgtgccgaacgttaccgcgccggtgtacagccacctgatctatgatgttattccggacggcgataaaaccgtggttcagccggacatcctgattctggagggtctgaacgtgctgcaaagcggctgcgactatccgcacgatccgcaccacgtgtttgttagcgacttcgtggattttagcatctacgttgacgcgccggaggatctgctgcagacctggtacattaaccgtttcctgaaactgcgtgagggtgcgttcaccgacccggatagctactttcacgggtatgcgaagctgaccaaggaagaggcgatcaaaaccgcgatgaccatttggaaggagatgaacagcgtgaacctgaagcaaaacattctgccgacccgtgaacgtgcgagcctgattttgaccaaaagtgcaaaccacatcgtggaggaagttcgtctgcgtaag

SEQ ID NO: 220 - protein, 326 aa, Artificial Sequence
  Engineered variant of Pantothenate Kinase from Escherichia coli
MHHHHHHGGSGSIKEQTEMTPYLQLDRNQWAAVRRSNPMTLSEDEIARLKGINEDLSLEEVAEVYLPLSRVLNLYISSNLRRQAQLEQFLGTNGQRIPYIISVAGSVAVGKSTFARVLQALLSRWPEHRRVEHISTDGFLLPNQVLKERGLMGKKGFPESYDMHRLMKFVKDLKSGVPNVTAPVYSHLIYDVIPDGDKTVVQPDILILEGLNVLQSGCDYPHDPHHVFVSDFVDFSIYVDAPEDLLQTWYINRFLKLREGAFTDPDSYFHGYAKLTKEEAIKTAMTIWKEMNSVNLKQNILPTRERASLILTKSANHIVEEVRLRK

SEQ ID NO: 221 - DNA, 978 bp, Artificial Sequence
  Engineered variant of Pantothenate Kinase from Escherichia coli
atgcaccatcatcatcatcatggcggtagcggcagcatcaaagagcagaccgagctgaccccgtacctgcaactggaccgtaaccaatgggcggcggtgcgtcgcagtaacccgatgaccctgagcgaggacgaaatcgcgcgtctgaagggtattaacgaagatctgagcctggaggaagtggcggaagtctacctgccgctgagccgtgttctgaacttctatattagcagcaacctgcgtcgtcaggcgcagctggaacagtttctgggtaccaatggccagcgtatcccgtatatcattagcgttgcgggtagcgtggcggttggcaaaagcacctttgcgcgtgtgctgcaggcgctgctgagccgttggccggagcatcgtcgtgttgaacatatcagcaccgacggcttcctgctgccgaaccaagtcctgaaggagcgtggtctgatggggaaaaagggtttcccggaaagctacgatatgcaccgtctgatgaaatttgttaaagacctgaagagcggtgtgccgaacgttaccgcgccggtgtacagccacctgatctatgatgttattccggatggcggtaaaaccgtggttcagccggacatcctgattctggagggtctgaacgtgctgcaaagcggctgcgactatccgcacgatccgcaccacgtgtttgttagcgacttcgtggattttagcatctacgttgacgcgccggaggatctgctgcagacctggtacattaaccgtttcctgaaactgcgtgagggtgcgttcaccgacccggatagctactttcacgggtatgcgaagatgaccaaggaagaggcgatcaaaaccgcgatgaccatttggaaggagatgaacagcgtgaacctgaagcaaaacattctgccgacccgtgaacgtgcgagcctgattctgaccaaaagtgcaaaccacatcgtggaggaagttcgtctgcgtaag

SEQ ID NO: 222 - protein, 326 aa, Artificial Sequence
  Engineered variant of Pantothenate Kinase from Escherichia coli
MHHHHHHGGSGSIKEQTELTPYLQLDRNQWAAVRRSNPMTLSEDEIARLKGINEDLSLEEVAEVYLPLSRVLNFYISSNLRRQAQLEQFLGTNGQRIPYIISVAGSVAVGKSTFARVLQALLSRWPEHRRVEHISTDGFLLPNQVLKERGLMGKKGFPESYDMHRLMKFVKDLKSGVPNVTAPVYSHLIYDVIPDGGKTVVQPDILILEGLNVLQSGCDYPHDPHHVFVSDFVDFSIYVDAPEDLLQTWYINRFLKLREGAFTDPDSYFHGYAKMTKEEAIKTAMTIWKEMNSVNLKQNILPTRERASLILTKSANHIVEEVRLRK

SEQ ID NO: 223 - DNA, 978 bp, Artificial Sequence
  Engineered variant of Pantothenate Kinase from Escherichia coli
atgcaccatcatcatcatcatggcggtagcggcagcatcaaagagcagaccgagatgggtccgtacctgcaactggaccgtaaccaatgggcggcggtgcgtgatagtaacccgatgaccctgagcgaggacgaaatcgcgcgtctgaagggtattaacgaagatctgagcctggaggaagtggcggaagtctacctgccgctgagccgtgttctgaacttctatattagcagcaacctgcgtcgtcaggcgcagctggaacagtttctgggtaccaacggccagcgtatcccgtatatcattagcgttgcgggtagcgtggcggttggcaaaagcacctttgcgcgtgtgctgcaggcgctgctgagccgttggccggagcatcgtcgtgttgaacatatcagcaccgacggcttcctgctgccgaaccaagtgctgaaggagcgtggtctgatggggaaaaagggtttcccggaaagctacgatatgagccgtctgatgaaatttgttaaagacctgaagagcggtgtgccggttgttaccgcgccggtgtacagccacctgatctatgatgttattccggacggcgataaaaccgtggttcagccggacatcctgattctggagggtctgaacgtgctgcaaagcggcatggactatccacacgatccgcaccacgtgtttgttagcgacttcgtggattttagcatctacgttgacgcgccggaggatctgctgcagacctggtacattaaccgtttcctgaaactgcgtgagggtgcgttcaccgacccggatagctactttcacgggtatgcgaaactgaccaaggaagaggcgatcaaaaccgcgatgaccatttggaaggagatgaacagcgtgaacctgaagcaaaacattctgccgacccgtgaacgtgcgatgctgattttgaccaaaagtgcaaaccacatcgtgaaagaggttcgtctgcgtaag

SEQ ID NO: 224 - protein, 326 aa, Artificial Sequence
  Engineered variant of Pantothenate Kinase from Escherichia coli
MHHHHHHGGSGSIKEQTEMGPYLQLDRNQWAAVRDSNPMTLSEDEIARLKGINEDLSLEEVAEVYLPLSRVLNFYISSNLRRQAQLEQFLGTNGQRIPYIISVAGSVAVGKSTFARVLQALLSRWPEHRRVEHISTDGFLLPNQVLKERGLMGKKGFPESYDMSRLMKFVKDLKSGVPVVTAPVYSHLIYDVIPDGDKTVVQPDILILEGLNVLQSGMDYPHDPHHVFVSDFVDFSIYVDAPEDLLQTWYINRFLKLREGAFTDPDSYFHGYAKLTKEEAIKTAMTIWKEMNSVNLKQNILPTRERAMLILTKSANHIVKEVRLRK

SEQ ID NO: 225 - DNA, 978 bp, Artificial Sequence
  Engineered variant of Pantothenate Kinase from Escherichia coli
atgcaccatcatcatcatcatggcggtagcggcagcatcaaagagcagaccgagatgggtccgtacctgcaactggaccgtaaccaatgggcggcggtgcgtgatagtaacccgatgaccctgagcgaggacgaaatcgcgcgtctgaagggtattaacgaagatctgagcctgcgtgaagtggcggaagtctacctgccgctgagccgtgttctgaacttctatattagcagcaacctgcgtcgtcaggcgcagctggaacagtttctgggtaccaatggccagcgtatcccgtatatcattagcgttgcgggtagcgtggcggttggcaaaagcacctttgcgcgtgtgctgcaggttctgctgagccgttggccggagcatcgtcgtgttgaacatatcagcaccgacggcttcctgctgccgaaccaagtgctgaaggagcgtggtctgatggggaaaaagggtttcccggaaagctacgatatgagccgtctgatgaaatttgttaaagacctgaagagcggtgtgccgaatgttaccgcgccggtgtacagccacctgatctatgatgttattccggacggcgataaaaccgtggttcagccggacatcctgattctggagggtctgaacgtgctgcaaagcggcatggactatccgcacgatccgcaccacgtgtttgttagcgacttcgtggattttagcatctacgttgacgcgccggaggatctgctgcagacctggtacattaaccgtttcctgaaactgcgtgagggtgcgttcatggacccggatagctactttcacgggtatgcgaaactgaccaaggaagaggcgatcgctaccgcgatgaccatttggaaggagatgaacagcgtgaacctgaagcaaaacattctgccgacccgtgaacgtgcgagcctgattttgaccaaaagtgcaaaccacatcgtggaggaagttcgtctgcgtaag

SEQ ID NO: 226 - protein, 326 aa, Artificial Sequence
  Engineered variant of Pantothenate Kinase from Escherichia coli
MHHHHHHGGSGSIKEQTEMGPYLQLDRNQWAAVRDSNPMTLSEDEIARLKGINEDLSLREVAEVYLPLSRVLNFYISSNLRRQAQLEQFLGTNGQRIPYIISVAGSVAVGKSTFARVLQVLLSRWPEHRRVEHISTDGFLLPNQVLKERGLMGKKGFPESYDMSRLMKFVKDLKSGVPNVTAPVYSHLIYDVIPDGDKTVVQPDILILEGLNVLQSGMDYPHDPHHVFVSDFVDFSIYVDAPEDLLQTWYINRFLKLREGAFMDPDSYFHGYAKLTKEEAIATAMTIWKEMNSVNLKQNILPTRERASLILTKSANHIVEEVRLRK

SEQ ID NO: 227 - DNA, 978 bp, Artificial Sequence
  Engineered variant of Pantothenate Kinase from Escherichia coli
atgcaccatcatcatcatcatggcggtagcggcagcatcaaagagcagaccgagatgggtccgtacctgcaactggaccgtaaccaatgggcggcggtgcgtgatagtaacccgatgaccctgagcgaggacgaaatcgcgcgtctgaagggtattaacgaagatctgagcctggaggaagtggcggaagtctacctgccgctgagccgtgttctgaacttctatattagcagcaacctgcgtcgtcaggcgcagctggaacagtttctgggtaccaatggccagcgtatcccgtatatcattagcgttgcgggtagcgtggcggttggcaaaagcacctttgcgcgtgtgctgcaggcgctgctgagccgttggccggagcatcgtcgtgttgaacatatcagcaccgacggcttcctgctgccgaaccaagtgctgaaggagcgtggtctgatggggaaaaagggtttcccggaaagctacgatatgcaccgtctgatgaaatttgttaaagacctgaagagcggtgtgccgaacgttaccgcgccggtgtacagccacctgatctatgatgttattccggacggcgataaaaccgtggttcagccggacatcctgattctggagggtctgaacgtgctgcaaagcggcatggactatccacacgatccgcaccacgtgtttgttagcgacttcgtggattttagcatctacgttgacgcgccggaggatctgctgcagacctggtacattaaccgtttcctgaaactgcgtgagggtgcgttcaccgacccggatagctactttcacgggtatgcgaaactgaccaaggaagaggcgatcaagaccgcgatgaccatttggaaggagatgaacagcgtgaacctgaagcaaaacattctgccgacccgtgaacgtgcgatgctgattttgaccaaaagtgcaaaccacatcgtggaggaagttcgtctgcgtaag

SEQ ID NO: 228 - protein, 326 aa, Artificial Sequence
  Engineered variant of Pantothenate Kinase from Escherichia coli
MHHHHHHGGSGSIKEQTEMGPYLQLDRNQWAAVRDSNPMTLSEDEIARLKGINEDLSLEEVAEVYLPLSRVLNFYISSNLRRQAQLEQFLGTNGQRIPYIISVAGSVAVGKSTFARVLQALLSRWPEHRRVEHISTDGFLLPNQVLKERGLMGKKGFPESYDMHRLMKFVKDLKSGVPNVTAPVYSHLIYDVIPDGDKTVVQPDILILEGLNVLQSGMDYPHDPHHVFVSDFVDFSIYVDAPEDLLQTWYINRFLKLREGAFTDPDSYFHGYAKLTKEEAIKTAMTIWKEMNSVNLKQNILPTRERAMLILTKSANHIVEEVRLRK

SEQ ID NO: 229 - DNA, 978 bp, Artificial Sequence
  Engineered variant of Pantothenate Kinase from Escherichia coli
atgcaccatcatcatcatcatggcggtagcggcagcatcaaagagcagaccgagatgaccccgtacctgcaactggaccgtaaccaatgggcggcggtgcgtgatagtaacccgatgaccctgagcgaggacgaaatcgcgcgtctgaagggtattaacgaagatctgagcctggaggaagtggcggaagtctacctgccgctgagccgtgttctgaacctgtatatttcgagcaacctgcgtcgtcaggcgcagctggaacagtttctgggtaccaatggccagcgtatcccgtatatcattagcgttgcgggtagcgtggcggttggcaaaagcacctttgcgcgtgtgctgcaggcgctgctgagccgttggccggagcatcgtcgtgttgaacatatcagcaccgacggcttcctgcacccgaaccaagtgctgaaggagcgtggtctgatggggaaaaagggtttcccggaaagctacgatatgcaccgtctgatgaaatttgttaaagacctgaagagcggtgtgccgaacgttaccgcgccggtgtacagccacctgatctatgatgttattccggacggcgataaaaccgtggttcagccggacatcctgattctggagggtctgaacgtgctgcaaagcggcatggactatccgcacgatccgcaccacgtgtttgttagcgacttcgtggattttagcatctacgttgacgcgccggaggatctgctgcagacctggtacattaaccgtttcctgaaactgcgtgagggtgcgttcaccgacccggatagctactttcacgggtatgcgaaactgaccaaggaagaggcgatcaaaaccgcgatgaccatttggaaggagatgaacagcgtgaacctgaagcaaaacattctgccgacccgtgaacgtgcgagcctgattctgaccaaaagtgcaaaccacatcgtggaggaagttcgtctgcgtaag

SEQ ID NO: 230 - protein, 326 aa, Artificial Sequence
  Engineered variant of Pantothenate Kinase from Escherichia coli
MHHHHHHGGSGSIKEQTEMTPYLQLDRNQWAAVRDSNPMTLSEDEIARLKGINEDLSLEEVAEVYLPLSRVLNLYISSNLRRQAQLEQFLGTNGQRIPYIISVAGSVAVGKSTFARVLQALLSRWPEHRRVEHISTDGFLHPNQVLKERGLMGKKGFPESYDMHRLMKFVKDLKSGVPNVTAPVYSHLIYDVIPDGDKTVVQPDILILEGLNVLQSGMDYPHDPHHVFVSDFVDFSIYVDAPEDLLQTWYINRFLKLREGAFTDPDSYFHGYAKLTKEEAIKTAMTIWKEMNSVNLKQNILPTRERASLILTKSANHIVEEVRLRK

SEQ ID NO: 231 - DNA, 978 bp, Artificial Sequence
  Engineered variant of Pantothenate Kinase from Escherichia coli
atgcaccatcatcatcatcatggcggtagcggcagcatcaaagagcagaccgagatgaccccgtacctgcaactggaccgtaaccaatgggcggcggtgcgtgatagtaacccgatgaccctgagcgaggacgaaatcgcgcgtctgaagggtattaacgaagatctgagcctggaggaagtggcggaagtctacctgccgctgagccgtgttctgaacttctatattctgagcaacctgcgtcgtcaggcgcagctggaacagtttctgggtaccaatggccagcgtatcccgtatatcattagcgttgcgggtagcgtggcggttggcaaaagcacctttgcgcgtgtgctgcaggcgctgctgagccgttggccggagcatcgtcgtgttgaacatatcagcaccgacggcttcctgctgccgaaccaagtgctgaaggagcgtggtctgatggggaaaaagggtttcccggaaagctacgatatgcaccgtctgatgaaatttgttaaagacctgaagagcggtgtgccgaacgttaccgcgccggtgtacagccacctgatctatgatgttattccggacggcgataaaaccgtggttcagccggacatcctgattctggagggtctgaacgtgctgcaaagcggctgcgactatccgcacgatccgcaccacgtgtttgttagcgacttcgtggattttagcatctacgttgacgcgccggaggatctgctgcagacctggtacattaaccgtttcctgaaactgcgtgagggtgcgttcaccgacccggatagctactttcacgggtatgcgaaactgaccaaggaagaggcgatcaaaaccgcgatgaccatttggaaggagatgaacagcgtgaacctgaagcaaaacattctgccgacccgtgaacgtgcgagcctgattctgaccaaaagtgcaaaccacatcgtggaggaagttcgtctgcgtaag

SEQ ID NO: 232 - protein, 326 aa, Artificial Sequence
  Engineered variant of Pantothenate Kinase from Escherichia coli
MHHHHHHGGSGSIKEQTEMTPYLQLDRNQWAAVRDSNPMTLSEDEIARLKGINEDLSLEEVAEVYLPLSRVLNFYILSNLRRQAQLEQFLGTNGQRIPYIISVAGSVAVGKSTFARVLQALLSRWPEHRRVEHISTDGFLLPNQVLKERGLMGKKGFPESYDMHRLMKFVKDLKSGVPNVTAPVYSHLIYDVIPDGDKTVVQPDILILEGLNVLQSGCDYPHDPHHVFVSDFVDFSIYVDAPEDLLQTWYINRFLKLREGAFTDPDSYFHGYAKLTKEEAIKTAMTIWKEMNSVNLKQNILPTRERASLILTKSANHIVEEVRLRK

SEQ ID NO: 233 - DNA, 978 bp, Artificial Sequence
  Engineered variant of Pantothenate Kinase from Escherichia coli
atgcaccatcatcatcatcatggcggtagcggcagcatcaaagagcagaccgagatgactccgtacctgcaactggaccgtaaccaatgggcggcggtgcgtgatagtaacccgatgaccctgagcgaggacgaaatcgcgcgtctgaagggtattaacgaagatctgagcctgcgtgaagtggcggaagtctacctgccgctgagccgtgttctgaacttctatattagcagcaacctgcgtcgtcaggcgcagctggaacagtttctgggtaccaacggccagcgtatcccgtatatcattagcgttgcgggtagcgtggcggttggcaaaagcacctttgcgcgtgtgctgcaggttctgctgagccgttggccggagcatcgtcgtgttgaacatatcagcaccgacggcttcctgctgccgaaccaagtgctgaaggagcgtggtctgatggggaaaaagggtttcccggaaagctacgatatgcaccgtctgatgaaatttgttaaagacctgaagagcggtgtgccgaacgttaccgcgccggtgtacagccacctgatctatgatgttattccggacggcgataaaaccgtggttcagccggacatcctgattctggagggtctgaacgtgctgcaaagcggcatggactatccgcacgatccgcaccacgtgtttgttagcgacttcgtggattttagcatctacgttgacgcgccggaggatctgctgcagacctggtacattaaccgtttcctgaaactgcgtgagggtgcgttcaccgacccggatagctactttcacgggtatgcgaaactgaccaaggaagaggcgatcaaaaccgcgatgaccatttggaaggagatgaacagcgtgaacctgaagcaaaacattctgccgacccgtgaacgtgcgagcctgattttgaccaaaagtgcaaaccacatcgtggaggaagttcgtctgcgtaag

SEQ ID NO: 234 - protein, 326 aa, Artificial Sequence
  Engineered variant of Pantothenate Kinase from Escherichia coli
MHHHHHHGGSGSIKEQTEMTPYLQLDRNQWAAVRDSNPMTLSEDEIARLKGINEDLSLREVAEVYLPLSRVLNFYISSNLRRQAQLEQFLGTNGQRIPYIISVAGSVAVGKSTFARVLQVLLSRWPEHRRVEHISTDGFLLPNQVLKERGLMGKKGFPESYDMHRLMKFVKDLKSGVPNVTAPVYSHLIYDVIPDGDKTVVQPDILILEGLNVLQSGMDYPHDPHHVFVSDFVDFSIYVDAPEDLLQTWYINRFLKLREGAFTDPDSYFHGYAKLTKEEAIKTAMTIWKEMNSVNLKQNILPTRERASLILTKSANHIVEEVRLRK

SEQ ID NO: 235 - DNA, 978 bp, Artificial Sequence
  Engineered variant of Pantothenate Kinase from Escherichia coli
atgcaccatcatcatcatcatggcggtagcggcagcatcaaagagcaggttgagatgaccccgtacctgcaactggaccgtaaccaatgggcggcggtgcgtgatagtaacccgatgaccctgagcgaggacgaaatcgcgcgtctgaagggtattaacgaagatctgagcctggaggaagtggcgctggtctacctgccgctgagccgtgttctgaacttctatattagcagcaacctgcgtcgtcaggcgcagctggaacagtttctgggtaccaatggccagcctatcccgtatatcattagcgttgcgggtagcgtggcggttggcaaaagcacctttgcgcgtgtgctgcaggcgctgctgagccgttggccggagcatcgtcgtgttgaacatatcagcaccgacggcttcctgctgccgaaccaagtgctgaaggagcgtggtctgatggggaaaaagggtttcccggaaagctacgatatgcaccgtctgatgaaatttgttaaagacctgaagagcggtgtgccgaacgttaccgcgccggtgtacagccacctgatctatgatgttattccggacggcgataaaaccgtggttcagccggacatcctgattctggagggtctgaacgtgctgcaaagcggcatggactatccgcacgatccgcaccacgtgtttgttagcgacttcgtggattttagcatctacgttgacgcgccggaggatctgctgcagacctggtacattaaccgtttcctgaaactgcgtgagggtgcgttcaccgacccggatagctactttcacgggtatgcgaaactgaccaaggaagaggcgatcaaaaccgcgatgaccatttggaaggagatgaacagcgtgaacctgaagcaaaacattctgccgacccgtgaacgtgcgagcctgattttgaccaaaagtgcaaaccacatcgtggaggaagttcgtctgcgtaag

SEQ ID NO: 236 - protein, 326 aa, Artificial Sequence
  Engineered variant of Pantothenate Kinase from Escherichia coli
MHHHHHHGGSGSIKEQVEMTPYLQLDRNQWAAVRDSNPMTLSEDEIARLKGINEDLSLEEVALVYLPLSRVLNFYISSNLRRQAQLEQFLGTNGQPIPYIISVAGSVAVGKSTFARVLQALLSRWPEHRRVEHISTDGFLLPNQVLKERGLMGKKGFPESYDMHRLMKFVKDLKSGVPNVTAPVYSHLIYDVIPDGDKTVVQPDILILEGLNVLQSGMDYPHDPHHVFVSDFVDFSIYVDAPEDLLQTWYINRFLKLREGAFTDPDSYFHGYAKLTKEEAIKTAMTIWKEMNSVNLKQNILPTRERASLILTKSANHIVEEVRLRK

SEQ ID NO: 237 - DNA, 978 bp, Artificial Sequence
  Engineered variant of Pantothenate Kinase from Escherichia coli
atgcaccatcatcatcatcatggcggtagcggcagcatcaaagagcagaccgagatgggtccgtacctgcaactggaccgtaaccaatgggcggcggtgcgtgatagtaacccgatgaccctgagcgaggacgaaatcgcgcgtctgaagggtattaacgaagatctgagcctggaggaagtggcggaagtctacctgccgctgagccgtgttctgaacttctatattagcagcaacctgcgtcgtcaggcgcagctggaacagtttctgggtaccaatggccagcgtatcccgtatatcattagcgttgcgggtagcgtggcggttggcaaaagcacctttgcgcgtgtgctgcaggcgctgctgagccgttggccggagcatcgtcgtgttgaacatatcagcaccgacggcttcctgctgccgaaccaagtgctgaaggagcgtggtctgatggggaaaaagggtttcccggaaagctacgatatgagccgtctgatgaaatttgttaaagacctgaagagcggtgtgccgaatgttaccgcgccggtgtacagccacctgatctatgatgttattccggacggcgataaaaccgtggttcagccggacatcctgattctggagggtctgaacgtgctgcaaagcggcatggactatccgcacgatccgcaccacgtgttcgttagcgacttcgtggattttagcatctacgttgacgcgccggaggatctgctgcagacctggtacattaaccgtttcctgaaactgcgtgagggtgcgttcaccgacccggatagctactttcacgggtatgcgaaactgaccaaggaagaggcgatcaaaaccgcgatgaccatttggaaggagatgaacagcgtgaacctgaagcaaaacattctgccgacccgtgaacgtgcgagcctgattttgaccaaaagtgcaaaccacatcgtggaggaagttcgtctgcgtaag

SEQ ID NO: 238 - protein, 326 aa, Artificial Sequence
  Engineered variant of Pantothenate Kinase from Escherichia coli
MHHHHHHGGSGSIKEQTEMGPYLQLDRNQWAAVRDSNPMTLSEDEIARLKGINEDLSLEEVAEVYLPLSRVLNFYISSNLRRQAQLEQFLGTNGQRIPYIISVAGSVAVGKSTFARVLQALLSRWPEHRRVEHISTDGFLLPNQVLKERGLMGKKGFPESYDMSRLMKFVKDLKSGVPNVTAPVYSHLIYDVIPDGDKTVVQPDILILEGLNVLQSGMDYPHDPHHVFVSDFVDFSIYVDAPEDLLQTWYINRFLKLREGAFTDPDSYFHGYAKLTKEEAIKTAMTIWKEMNSVNLKQNILPTRERASLILTKSANHIVEEVRLRK

SEQ ID NO: 239 - DNA, 978 bp, Artificial Sequence
  Engineered variant of Pantothenate Kinase from Escherichia coli
atgcaccatcatcatcatcatggcggtagcggcagcatcaaagagcagaccgagctgaccccgtacctgcaactggaccgtaaccaatgggcggcggtgcgtgatagtaacccgatgaccctgagcgaggacgaaatcgcgcgtctgaagggtattaacgaagatctgagcctggaggaagtggcggaagtctacctgccgctgagccgtgttctgaacttctatatttcgagcaacctgcgtcgtcaggcgagtctggaacagtttctgggtaccaatggccagcgtatcccgtatatcattagcgttgcgggtagcgtggcggttggcaaaagcacctttgcgcgtgtgctgcaggcgctgctgagccgttggccggagcatcgtcgtgttgaacatatcagcaccgacggcttcctgctgccgaaccaaatcctgaaggagcgtggtctgatggggaaaaagggtttcccggaaagctacgatatgcaccgtctgatgaaatttgttaaagacctgaagagcggtgtgccgaacgttaccgcgccggtgtacagccacctgatctatgatgttattccggatggcggtaaaaccgtggttcagccggacatcctgattctggagggtctgaacgtgctgcaaagcggctgcgactatccgcacgatccgcaccacgtgtttgttagcgacttcgtggattttagcatctacgttgacgcgccggaggatctgctgcagacctggtacattaaccgtttcctgaaactgcgtgagggtgcgttcaccgacccggatagctactttcacgggtatgcgaagctgaccaaggaagaggcgatcaaaaccgcgatgaccatttggaaggagatgaacagcgtgaacctgaagcaaaacattctgccgacccgtgaacgtgcggcgctgattttgaccaaaagtgcaaaccacatcgtggaggaagttcgtctgcgtaag

SEQ ID NO: 240 - protein, 326 aa, Artificial Sequence
  Engineered variant of Pantothenate Kinase from Escherichia coli
MHHHHHHGGSGSIKEQTELTPYLQLDRNQWAAVRDSNPMTLSEDEIARLKGINEDLSLEEVAEVYLPLSRVLNFYISSNLRRQASLEQFLGTNGQRIPYIISVAGSVAVGKSTFARVLQALLSRWPEHRRVEHISTDGFLLPNQILKERGLMGKKGFPESYDMHRLMKFVKDLKSGVPNVTAPVYSHLIYDVIPDGGKTVVQPDILILEGLNVLQSGCDYPHDPHHVFVSDFVDFSIYVDAPEDLLQTWYINRFLKLREGAFTDPDSYFHGYAKLTKEEAIKTAMTIWKEMNSVNLKQNILPTRERAALILTKSANHIVEEVRLRK

SEQ ID NO: 241 - DNA, 978 bp, Artificial Sequence
  Engineered variant of Pantothenate Kinase from Escherichia coli
atgcaccatcatcatcatcatggcggtagcggcagcatcaaagagcagaccgagatgggtccgtacctgcaactggaccgtaaccaatgggcggcggtgcgtgatagtaacccgatgaccctgagcgaggacgaaatcgcgcgtctgaagggtattaacgaagatctgagcctggaggaagtggcggaagtctacctgccgctgagccgtgttctgaacttctatattagcagcaacctgcgtcgtcaggcgcagctggaacagtttctgggtaccaatggccagcgtatcccgtatatcattagcgttgcgggtagcgtggcggttggcaaaagcacctttgcgcgtgtgctgcaggcgctgctgagccgttggccggagcatcgtcgtgttgaacatatcagcaccgacggcttcctgctgccgaaccaagtgctgaaggagcgtggtctgatggggaaaaagggtttcccggaaagctacgatatgcaccgtctgatgaaatttgttaaagacctgaagagcggtgtgccgaacgttaccgcgccggtgtacagccacctgatctatgatgttattccggacggcgataaaaccgtggttcagccggacatcctgattctggagggtctgaacgtgctgcaaagcggcatggactatccgcacgatccgcaccacgtgtttgttagcgacttcgtggattttagcatctacgttgacgcgccggaggatctgctgcagacctggtacattaaccgtttcctgaaactgcgtgagggtgcgttcaccgacccggatagctactttcacgggtatgcgaaactgaccaaggaagaggcgatcgctaccgcgatgaccatttggaaggagatgaacagcgtgaacctgaagcaaaacattctgccgacccgtgaacgtgcgagcctgattttgaccaaaagtgcaaaccacatcgtggaggaagttcgtctgcgtaag

SEQ ID NO: 242 - protein, 326 aa, Artificial Sequence
  Engineered variant of Pantothenate Kinase from Escherichia coli
MHHHHHHGGSGSIKEQTEMGPYLQLDRNQWAAVRDSNPMTLSEDEIARLKGINEDLSLEEVAEVYLPLSRVLNFYISSNLRRQAQLEQFLGTNGQRIPYIISVAGSVAVGKSTFARVLQALLSRWPEHRRVEHISTDGFLLPNQVLKERGLMGKKGFPESYDMHRLMKFVKDLKSGVPNVTAPVYSHLIYDVIPDGDKTVVQPDILILEGLNVLQSGMDYPHDPHHVFVSDFVDFSIYVDAPEDLLQTWYINRFLKLREGAFTDPDSYFHGYAKLTKEEAIATAMTIWKEMNSVNLKQNILPTRERASLILTKSANHIVEEVRLRK

SEQ ID NO: 243 - DNA, 978 bp, Artificial Sequence
  Engineered variant of Pantothenate Kinase from Escherichia coli
atgcaccatcatcatcatcatggcggtagcggcagcatcaaagagcaggttgagatgaccccgtacctgcaactggaccgtaaccaatgggcggcggtgcgtgatagtaacccgatgaccctgagcgaggacgaaatcgcgcgtctgaagggtattaacgaagatctgagcctggaggaagtggcggaagtctacctgccgctgagccgtgttctgaacttctatattagcagcaacctgcgtcgtcaggcgcagctggaacagtttctgggtaccaatggccagcgtatcccgtatatcattagcgttgcgggtagcgtggcggttggcaaaagcacctttgcgcgtgtgctgcaggcgctgctgagccgttgggtagagcatagctacgttgaacatatcagcaccgacggcttcctgctgccgaaccaagtgctgaaggagcgtggtctgatggggaaaaagggtttcccggaaagctacgatatgcctcgtctgatgaaatttgttaaagacctgaagagcggtgtgccgaacgttaccgcgccggtgtacagccacctgatctatgatgttattccggacggcgataaaaccgtggttcagccggacatcctgattctggagggtctgaacgtgctgcaaagcggcatggactatccgcacgatccgcaccacgtgtttgttagcgacttcgtggattttagcatctacgttgacgcgccggaggatctgctgcagacctggtacattaaccgtttcctgaaactgcgtgagggtgcgttcaccgacccggatagctactttcacgggtatgcgaaactgaccaaggaagaggcgatcaaaaccgcgatgaccatttggaaggagatgaacagcgtgaacctgaagcaaaacattctgccgacccgtgaacgtgcgagcctgattttgaccaaaagtgcaaaccacatcgtggaggaagttcgtctgcgtaag

SEQ ID NO: 244 - protein, 326 aa, Artificial Sequence
  Engineered variant of Pantothenate Kinase from Escherichia coli
MHHHHHHGGSGSIKEQVEMTPYLQLDRNQWAAVRDSNPMTLSEDEIARLKGINEDLSLEEVAEVYLPLSRVLNFYISSNLRRQAQLEQFLGTNGQRIPYIISVAGSVAVGKSTFARVLQALLSRWVEHSYVEHISTDGFLLPNQVLKERGLMGKKGFPESYDMPRLMKFVKDLKSGVPNVTAPVYSHLIYDVIPDGDKTVVQPDILILEGLNVLQSGMDYPHDPHHVFVSDFVDFSIYVDAPEDLLQTWYINRFLKLREGAFTDPDSYFHGYAKLTKEEAIKTAMTIWKEMNSVNLKQNILPTRERASLILTKSANHIVEEVRLRK

SEQ ID NO: 245 - DNA, 978 bp, Artificial Sequence
  Engineered variant of Pantothenate Kinase from Escherichia coli
atgcaccatcatcatcatcatggcggtagcggcagcatcaaagagcaggttgagatgaccccgtacctgcaactggaccgtaaccaatgggcggcggtgcgtgatagtaacccgatgaccctgagcgaggacgaaaaagcgcgtctgaagggtattaacgaagatctgagcctggaggaagtggcggaagtctacctgccgctgagccgtgttctgaacttctatattagcagcaatctgcgtcgtcaggcgcagctggaacagtttctgggtaccaatggccagcgtatcccgtatatcattagcgttgcgggtagcgtggcggttggcaaaagcacctttgcgcgtgtgctgcaggcgctgctgagccgttggccagagagcggctacgttgaacatatcagcaccgacggcttcctgctgccgaaccaagtgctgaaggagcgtggtctgatggggaaaaagggtttcccggaaagctacgatatgcctcgtctgatgaaatttgttaaagacctgaagagcggtgtgccgaacgttaccgcgccggtgtacagccacctgatctatgatgttgtcccggacggcgataaaaccgtggttcagccggacatcctgattctggagggtctgaacgtgctgcaaagcggcatggactatccgcacgatccgcaccacgtgtttgttagcgacttcgtggattttagcatctacgttgacgcgccggaggatctgctgcagacctggtacattaaccgtttcctgaaactgcgtgagggtgcgttcaccgacccggatagctactttcacgggtatgcgaaactgaccaaggaagaggcgatcaaaaccgcgatgaccatttggaaggagatgaacagcgtgaacctgaagcaaaacattctgccgacccgtgaacgtgcgagcctgattttgaccaaaagtgcaaaccacatcgtggaggaagttcgtctgcgtaag

SEQ ID NO: 246 - protein, 326 aa, Artificial Sequence
  Engineered variant of Pantothenate Kinase from Escherichia coli
MHHHHHHGGSGSIKEQVEMTPYLQLDRNQWAAVRDSNPMTLSEDEKARLKGINEDLSLEEVAEVYLPLSRVLNFYISSNLRRQAQLEQFLGTNGQRIPYIISVAGSVAVGKSTFARVLQALLSRWPESGYVEHISTDGFLLPNQVLKERGLMGKKGFPESYDMPRLMKFVKDLKSGVPNVTAPVYSHLIYDVVPDGDKTVVQPDILILEGLNVLQSGMDYPHDPHHVFVSDFVDFSIYVDAPEDLLQTWYINRFLKLREGAFTDPDSYFHGYAKLTKEEAIKTAMTIWKEMNSVNLKQNILPTRERASLILTKSANHIVEEVRLRK

SEQ ID NO: 247 - DNA, 978 bp, Artificial Sequence
  Engineered variant of Pantothenate Kinase from Escherichia coli
atgcaccatcatcatcatcatggcggtagcggcagcatcaaagagcaggttgagatgaccccgtacctgcaactggaccgtaaccaatgggcggcggtgcgtgatagtaacccgatgaccctgagcgaggacgaaaaagcgcgtctgaagggtattaacgaagatctgagcctggaggaagtggcgctggtctacctgccgctgagccgtgttctgaacttctatattagcagcaacctgcgtcgtcaggcgcagctggaacagtttctgggtaccaatggccagcctatcccgtatatcattagcgttgcgggtagcgtggcggttggcaaaagcacctttgcgcgtgtgctgcaggcgctgctgagccgttggccggagcatcgtcgtgttgaacatatcagcaccgacggcttcctgctgccgaaccaagtgctgaaggagcgtggtctgatggggaaaaagggtttcccggaaagctacgatatgcaccgtctgatgaaatttgttaaagacctgaagagcggtgtgccgaacgttaccgcgccggtgtacagccacctgatctatgatgttattccggacggcgataaaaccgtggttcagccggacatcctgattctggagggtctgaacgtgctgcaaagcggcatggactatccgcacgatccgcaccacgtgtttgttagcgacttcgtggattttagcatctacgttgacgcgccggaggatctgctgcagacctggtacattaaccgtttcctgaaactgcgtgagggtgcgttcaccgacccggatagctactttcacgggtatgcgaaactgaccaaggaagaggcgatcaaaaccgcgatgaccatttggaaggagatgaacagcgtgaacctgaagcaaaacattctgccgacccgtgaacgtgcgagcctgattttgaccaaaagtgcaaaccacatcgtggaggaagttcgtctgcgtaag

SEQ ID NO: 248 - protein, 326 aa, Artificial Sequence
  Engineered variant of Pantothenate Kinase from Escherichia coli
MHHHHHHGGSGSIKEQVEMTPYLQLDRNQWAAVRDSNPMTLSEDEKARLKGINEDLSLEEVALVYLPLSRVLNFYISSNLRRQAQLEQFLGTNGQPIPYIISVAGSVAVGKSTFARVLQALLSRWPEHRRVEHISTDGFLLPNQVLKERGLMGKKGFPESYDMHRLMKFVKDLKSGVPNVTAPVYSHLIYDVIPDGDKTVVQPDILILEGLNVLQSGMDYPHDPHHVFVSDFVDFSIYVDAPEDLLQTWYINRFLKLREGAFTDPDSYFHGYAKLTKEEAIKTAMTIWKEMNSVNLKQNILPTRERASLILTKSANHIVEEVRLRK

SEQ ID NO: 249 - DNA, 978 bp, Artificial Sequence
  Engineered variant of Pantothenate Kinase from Escherichia coli
atgcaccatcatcatcatcatggcggtagcggcagcatcaaagagcagaccgagatgaccccgtacctgcaactggaccgtaaccaatgggcggcggtgcgtgatagtaacccgatgaccctgagcgaggacgaaatcgcgcgtctgaagggtattaacgaagatctgagcctggaggaagtggcggaagtctacctgccgctgagccgtgttctgaacttctatattagcagcaacctgcgtcgtcaggcgcagctggaacagtttctgggtaccaatggccagcgtatcccgtatatcattagcgttgcgggtagcgtggcggttggcaaaagcacctttgcgcgtgtgctgcaggcgctgctgagccgttggccggagcatcgtcgtgttgaacatatcagcaccgacggcttcctgctgccgaaccaagtgctgaaggagcgtggtctgatggggaaaaagggtttcccggaaagctacgatatgcaccgtctgatgaaatttgttaaagacctgaagagcggtgtgccgaacgttaccgcgccggtgtacagccacctgatctatgatgttattccggacggcgataaaaccgtggttcagccggacatcctgattctggagggtctgaacgtgctgcaaagcggcatggactatccgcacgatccgcaccacgtgtttgttagcgacttcgtggattttagcatctacgttgacgcgccggaggatctgctgcagacctggtacattaaccgtttcctgaaactgcgtgagggtgcgttcatggacccggatagctactttcacgggtatgcgaaactgaccaaggaagaggcgatcaaaaccgcgatgaccatttggaaggagatgaacagcgtgaacctgaagcaaaacattctgccgacccgtgaacgtgcgagcctgattttgaccaaaagtgcaaaccacatcgtggaggaagttcgtctgcgtaag

SEQ ID NO: 250 - protein, 326 aa, Artificial Sequence
  Engineered variant of Pantothenate Kinase from Escherichia coli
MHHHHHHGGSGSIKEQTEMTPYLQLDRNQWAAVRDSNPMTLSEDEIARLKGINEDLSLEEVAEVYLPLSRVLNFYISSNLRRQAQLEQFLGTNGQRIPYIISVAGSVAVGKSTFARVLQALLSRWPEHRRVEHISTDGFLLPNQVLKERGLMGKKGFPESYDMHRLMKFVKDLKSGVPNVTAPVYSHLIYDVIPDGDKTVVQPDILILEGLNVLQSGMDYPHDPHHVFVSDFVDFSIYVDAPEDLLQTWYINRFLKLREGAFMDPDSYFHGYAKLTKEEAIKTAMTIWKEMNSVNLKQNILPTRERASLILTKSANHIVEEVRLRK

SEQ ID NO: 251 - DNA, 978 bp, Artificial Sequence
  Engineered variant of Pantothenate Kinase from Escherichia coli
atgcaccatcatcatcatcatggcggtagcggcagcatcaaagagcagaccgagatgaccccgtacctgcaactggaccgtaaccaatgggcggcggtgcgtgatagtaacccgatgaccctgagcgaggacgaaatcgcgcgtctgaagggtattaacgaagatctgagcctggaggaagtggcggaagtctacctgccgctgagccgtgttctgaacttctatattagcagcaacctgcgtcgtcaggcgcagctggaacagtttctgggtaccaatggccagcgtatcccgtatatcattagcgttgcgggtagcgtggcggttggcaaaagcacctttgcgcgtgtgctgcaggcgctgctgagccgttggccggagcatcgtcgtgttgaacatatcagcaccgacggcttcctgctgccgaaccaagtgctgaaggagcgtggtctgatggggaaaaagggtttcccggaaagctacgatatgagccgtctgatgaaatttgttaaagacctgaagagcggtgtgccgaatgttaccgcgccggtgtacagccacctgatctatgatgttattccggacggcgataaaaccgtggttcagccggacatcctgattctggagggtctgaacgtgctgcaaagcggcatggactattgtcacgatccgcaccacgtgtttgttagcgacttcgtggattttagcatctacgttgacgcgccggaggatctgctgcagacctggtacattaaccgtttcctgaaactgcgtgagggtgcgttcaccgacccggatagctactttcacgggtatgcgaaactgaccaaggaagaggcgatcaaaaccgcgatgaccatttggaaggagatgaacagcgtgaacctgaagcaaaacattctgccgacccgtgaacgtgcgatgctgattttgaccaaaagtgcaaaccacatcgtggaggaagttcgtctgcgtaag

SEQ ID NO: 252 - protein, 326 aa, Artificial Sequence
  Engineered variant of Pantothenate Kinase from Escherichia coli
MHHHHHHGGSGSIKEQTEMTPYLQLDRNQWAAVRDSNPMTLSEDEIARLKGINEDLSLEEVAEVYLPLSRVLNFYISSNLRRQAQLEQFLGTNGQRIPYIISVAGSVAVGKSTFARVLQALLSRWPEHRRVEHISTDGFLLPNQVLKERGLMGKKGFPESYDMSRLMKFVKDLKSGVPNVTAPVYSHLIYDVIPDGDKTVVQPDILILEGLNVLQSGMDYCHDPHHVFVSDFVDFSIYVDAPEDLLQTWYINRFLKLREGAFTDPDSYFHGYAKLTKEEAIKTAMTIWKEMNSVNLKQNILPTRERAMLILTKSANHIVEEVRLRK

SEQ ID NO: 253 - DNA, 978 bp, Artificial Sequence
  Engineered variant of Pantothenate Kinase from Escherichia coli
atgcaccatcatcatcatcatggcggtagcggcagcatcaaagagcagaccgagctgaccccgtacctgcaactggaccgtaaccaatgggcggcggtgcgtgatagtaacccgatgaccctgagcgaggacgaaatcgcgcgtctgaagggtattaacgaagatctgagcctggaggaagtggcggaagtctacctgccgctgagccgtgttctgaacttctatattagcagcaacctgcgtcgtcaggcgcagctggaacagtttctgggtaccaatggccagcgtatcccgtatatcattagcgttgcgggtagcgtggcggttggcaaaagcacctttgcgcgtgtgctgcaggcgctgctgagccgttggccggagcatcgtcgtgttgaacatatcagcaccgacggcttcctgcacccgaaccaagtgctgaaggagcgtggtctgatggggaaaaagggtttcccggaaagctacgatatgcaccgtctgatgaaatttgttaaagacctgaagagcggtgtgccgaacgttaccgcgccggtgtacagccacctgatctatgatgttattccggacggcgataaaaccgtggttcagccggacatcctgattctggagggtctgaacgtgctgcaaagcggcatggactatccgcacgatccgcaccacgtgtttgttagcgacttcgtggattttagcatctacgttgacgcgccggaggatctgctgcagacctggtacattaaccgtttcctgaaactgcgtgagggtgcgttcaccgacccggatagctactttcacgggtatgcgaaactgaccaaggaagaggcgatcaaaaccgcgatgaccatttggaaggagatgaacagcgtgaacctgaagcaaaacattctgccgacccgtgaacgtgcgagcctgattctgaccaaaagtgcaaaccacatcgtggaggaagttcgtctgcgtaag

SEQ ID NO: 254 - protein, 326 aa, Artificial Sequence
  Engineered variant of Pantothenate Kinase from Escherichia coli
MHHHHHHGGSGSIKEQTELTPYLQLDRNQWAAVRDSNPMTLSEDEIARLKGINEDLSLEEVAEVYLPLSRVLNFYISSNLRRQAQLEQFLGTNGQRIPYIISVAGSVAVGKSTFARVLQALLSRWPEHRRVEHISTDGFLHPNQVLKERGLMGKKGFPESYDMHRLMKFVKDLKSGVPNVTAPVYSHLIYDVIPDGDKTVVQPDILILEGLNVLQSGMDYPHDPHHVFVSDFVDFSIYVDAPEDLLQTWYINRFLKLREGAFTDPDSYFHGYAKLTKEEAIKTAMTIWKEMNSVNLKQNILPTRERASLILTKSANHIVEEVRLRK

SEQ ID NO: 255 - DNA, 978 bp, Artificial Sequence
  Engineered variant of Pantothenate Kinase from Escherichia coli
atgcaccatcatcatcatcatggcggtagcggcagcatcaaagagcaggttgagatgaccccgtacctgcaactggaccgtaaccaatgggcggcggtgcgtgatagtaacccgatgaccctgagcgaggacgaaatcgcgcgtctgaagggtattaacgaagatctgagcctggaggaagtggcggaagtctacctgccgctgagccgtgttctgaacttctatattagcagcaacctgcgtcgtcaggcgcagctggaacagtttctgggtaccaatggccagcgtatcccgtatatcattagcgttgcgggtagcgtggcggttggcaaaagcacctttgcgcgtgtgctgcaggcgctgctgagccgttggcaagagcatggccgcgttgaacatatcagcaccgacggcttcctgctgccgaaccaagtgctgaaggagcgtggtctgatggggaaaaagggtttcccggaaagctacgatatgcctcgtctgatgaaatttgttaaagacctgaagagcggtgtgccgaacgttaccgcgccggtgtacagccacctgatctatgatgttattccggacggcgataaaaccgtggttcagccggacatcctgattctggagggtctgaacgtgctgcaaagcggcatggactatccgcacgatccgcaccacgtgtttgttagcgacttcgtggattttagcatctacgttgacgcgccggaggatctgctgcagacctggtacattaaccgtttcctgaaactgcgtgagggggcgttcaccgacccggatagctactttcacgggtatgcgaaactgaccaaggaagaggcgatcaaaaccgcgatgaccatttggaaggagatgaacagcgtgaacctgaagcaaaacattctgccgacccgtgaacgtgcgagcctgattttgaccaaaagtgcaaaccacatcgtggaggaagttcgtctgcgtaag

SEQ ID NO: 256 - protein, 326 aa, Artificial Sequence
  Engineered variant of Pantothenate Kinase from Escherichia coli
MHHHHHHGGSGSIKEQVEMTPYLQLDRNQWAAVRDSNPMTLSEDEIARLKGINEDLSLEEVAEVYLPLSRVLNFYISSNLRRQAQLEQFLGTNGQRIPYIISVAGSVAVGKSTFARVLQALLSRWQEHGRVEHISTDGFLLPNQVLKERGLMGKKGFPESYDMPRLMKFVKDLKSGVPNVTAPVYSHLIYDVIPDGDKTVVQPDILILEGLNVLQSGMDYPHDPHHVFVSDFVDFSIYVDAPEDLLQTWYINRFLKLREGAFTDPDSYFHGYAKLTKEEAIKTAMTIWKEMNSVNLKQNILPTRERASLILTKSANHIVEEVRLRK

SEQ ID NO: 257 - DNA, 978 bp, Artificial Sequence
  Engineered variant of Pantothenate Kinase from Escherichia coli
atgcaccatcatcatcatcatggcggtagcggcagcatcaaagagcagaccgagatgggtccgtacctgcaactggaccgtaaccaatgggcggcggtgcgtgatagtaacccgatgaccctgagcgaggacgaaatcgcgcgtctgaagggtattaacgaagatctgagcctgcgtgaagtggcggaagtctacctgccgctgagccgtgttctgaacttctatattagcagcaacctgcgtcgtcaggcgcagctggaacagtttctgggtaccgggggccagcgtatcccgtatatcattagcgttgcgggtagcgtggcggttggcaaaagcacctttgcgcgtgtgctgcaggcgctgctgagccgttggccggagcatcgtcgtgttgaacatatcagcaccgacggcttcctgctgccgaaccaagtgctgaaggagcgtggtctgatggggaaaaagggtttcccggaaagctacgatatgcaccgtctgatgaaatttgttaaagacctgaagagcggtgtgccgaacgttaccgcgccggtgtacagccacctgatctatgatgttattccggacggcgataaaaccgtggttcagccggacatcctgattctggagggtctgaacgtgctgcaaagcggcatggactatccgcacgatccgcaccacgtgttcgttagcgacttcgtggattttagcatctacgttgacgcgccggaggatctgctgcagacctggtacattaaccgtttcctgaaactgcgtgagggtgcgttcaccgacccggatagctactttcacgggtatgcgaaactgaccaaggaagaggcgatcaaaaccgcgatgaccatttggaaggagatgaacagcgtgaacctgaagcaaaacattctgccgacccgtgaacgtgcgagcctgattctgaccaaaagtgcaaaccacatcgtggaggaagttcgtctgcgtaag

SEQ ID NO: 258 - protein, 326 aa, Artificial Sequence
  Engineered variant of Pantothenate Kinase from Escherichia coli
MHHHHHHGGSGSIKEQTEMGPYLQLDRNQWAAVRDSNPMTLSEDEIARLKGINEDLSLREVAEVYLPLSRVLNFYISSNLRRQAQLEQFLGTGGQRIPYIISVAGSVAVGKSTFARVLQALLSRWPEHRRVEHISTDGFLLPNQVLKERGLMGKKGFPESYDMHRLMKFVKDLKSGVPNVTAPVYSHLIYDVIPDGDKTVVQPDILILEGLNVLQSGMDYPHDPHHVFVSDFVDFSIYVDAPEDLLQTWYINRFLKLREGAFTDPDSYFHGYAKLTKEEAIKTAMTIWKEMNSVNLKQNILPTRERASLILTKSANHIVEEVRLRK

SEQ ID NO: 259 - DNA, 978 bp, Artificial Sequence
  Engineered variant of Pantothenate Kinase from Escherichia coli
atgcaccatcatcatcatcatggcggtagcggcagcatcaaagagcagaccgagatgaccccgtacctgcaactggaccgtaaccaatgggcggcggtgcgtgatagtaacccgatgaccctgagcgaggacgaaaaagcgcgtctgaagggtattaacgaagatctgagcctggaggaagtggcggaagtctacctgccgctgagccgtgttctgaacttctatattagcagcaacctgcgtcgtcaggcgcagctggaacagtttctgggtaccaatggccagcgtatcccgtatatcattagcgttgcgggtagcgtggcggttggcaaaagcacctttgcgcgtgtgctgcaggcgctgctgagccgttggccggagcatcgtcgtgttgaacatatcagcaccgacggcttcctgctgccgaaccaagtgctgaaggagcgtggtctgatggggaaaaagggtttcccggaaagctacgatatgcctcgtctgatgaaatttgttaaagacctgaagagcggtgtgccgaacgttaccgcgccggtgtacagccacctgatctatgatgttattccggacggcgataaaaccgtggttcagccggacatcctgattctggagggtctgaacgtgctgcaaagcggcatggactatccgcacgatccgcaccacgtgtttgttagcgacttcgtggattttagcatctacgttgacgcgccggaggatctgctgcagacctggtacattaaccgtttcctgaaactgcgtgagggtgcgttcaccgacccggatagctactttcacgggtatgcgaaactgaccaaggaagaggcgatcaaaaccgcgatgaccatttggaaggagatgaacagcgtgaacctgaagcaaaacattctgccgacccgtgaacgtgcgagcctgattctgaccaaaagtgcaaaccacatcgtggaggaagttcgtctgcgtaag

SEQ ID NO: 260 - protein, 326 aa, Artificial Sequence
  Engineered variant of Pantothenate Kinase from Escherichia coli
MHHHHHHGGSGSIKEQTEMTPYLQLDRNQWAAVRDSNPMTLSEDEKARLKGINEDLSLEEVAEVYLPLSRVLNFYISSNLRRQAQLEQFLGTNGQRIPYIISVAGSVAVGKSTFARVLQALLSRWPEHRRVEHISTDGFLLPNQVLKERGLMGKKGFPESYDMPRLMKFVKDLKSGVPNVTAPVYSHLIYDVIPDGDKTVVQPDILILEGLNVLQSGMDYPHDPHHVFVSDFVDFSIYVDAPEDLLQTWYINRFLKLREGAFTDPDSYFHGYAKLTKEEAIKTAMTIWKEMNSVNLKQNILPTRERASLILTKSANHIVEEVRLRK

SEQ ID NO: 261 - DNA, 978 bp, Artificial Sequence
  Engineered variant of Pantothenate Kinase from Escherichia coli
atgcaccatcatcatcatcatggcggtagcggcagcatcaaagagcagaccgagatgaccccgtacctgcaactggaccgtaaccaatgggcggcggtgcgtcgcagtaacccgatgaccctgagcgaggacgaaatcgcgcgtctgaagggtattaacgaagatctgagcctggaggaagtggcggaagtctacctgccgctgagccgtgttctgaacttctatattagcagcaacctgcgtcgtcaggcgcagctggaacagtttctgggtaccaatggccagcgtatcccgtatatcattagcgttgcgggtagcgtggcggttggcaaaagcacctttgcgcgtgtgctgcaggcgctgctgagccgttggccggagcatcgtcgtgttgaacatatcagcaccgacggcttcctgcacccgaaccaagtgctgaaggagcgtggtctgatggggaaaaagggtttcccggaaagctacgatatgcaccgtctgatgaaatttgttaaagacctgaagagcggtgtgccgaacgttaccgcgccggtgtacagccacctgatctatgatgttattccgggtggcgataaaaccgtggttcagccggacatcctgattctggagggtctgaacgtgctgcaaagcggctgcgactatccgcacgatccgcaccacgtgtttgttagcgacttcgtggattttagcatctacgttgacgcgccggaggatctgctgcagacctggtacattaaccgtttcctgaaactgcgtgagggtgcgttcaccgacccggatagctactttcacgggtatgcggcactgaccaaggaagaggcgatcaaaaccgcgatgaccatttggaaggagatgaacagcgtgaacctgaagcaaaacattctgccgacccgtgaacgtgcgtcgctgattttgaccaaaagtgcaaaccacatcgtggaggaagttcgtctgcgtaag

SEQ ID NO: 262 - protein, 326 aa, Artificial Sequence
  Engineered variant of Pantothenate Kinase from Escherichia coli
MHHHHHHGGSGSIKEQTEMTPYLQLDRNQWAAVRRSNPMTLSEDEIARLKGINEDLSLEEVAEVYLPLSRVLNFYISSNLRRQAQLEQFLGTNGQRIPYIISVAGSVAVGKSTFARVLQALLSRWPEHRRVEHISTDGFLHPNQVLKERGLMGKKGFPESYDMHRLMKFVKDLKSGVPNVTAPVYSHLIYDVIPGGDKTVVQPDILILEGLNVLQSGCDYPHDPHHVFVSDFVDFSIYVDAPEDLLQTWYINRFLKLREGAFTDPDSYFHGYAALTKEEAIKTAMTIWKEMNSVNLKQNILPTRERASLILTKSANHIVEEVRLRK

SEQ ID NO: 263 - DNA, 978 bp, Artificial Sequence
  Engineered variant of Pantothenate Kinase from Escherichia coli
atgcaccatcatcatcatcatggcggtagcggcagcatcaaagagcagaccgagatgactccgtacctgcaactggaccgtaaccaatgggcggcggtgcgtgatagtaacccgatgaccctgagcgaggacgaaatcgcgcgtctgaagggtattaacgaagatctgagcctgcgtgaagtggcggaagtctacctgccgctgagccgtgttctgaacttctatattagcagcaacctgcgtcgtcaggcgcagctggaacagtttctgggtaccaacggccagcgtatcccgtatatcattagcgttgcgggtagcgtggcggttggcaaaagcacctttgcgcgtgtgctgcaggcgctgctgagccgttggccggagcatcgtcgtgttgaacatatcagcaccgacggcttcctgctgccgaaccaagtgctgaaggagcgtggtctgatggggaaaaagggtttcccggaaagctacgatatgcaccgtctgatgaaatttgttaaagacctgaagagcggtgtgccgaatgttaccgcgccggtgtacagccacctgatctatgatgttattccggacggcgataaaaccgtggttcagccggacatcctgattctggagggtctgaacgtgctgcaaagcggcatggactatccgcacgatccgcaccacgtgtttgttagcgacttcgtggattttagcatctacgttgacgcgccggaggatctgctgcagacctggtacattaaccgtttcctgaaactgcgtgagggtgcgttcaccgacccggatagctactttcacgggtatgcgaaactgaccaaggaagaggcgatcaaaaccgcgatgaccatttggaaggagatgaacagcgtgaacctgaagcaaaacattctgccgacccgtgaacgtgcgagcctgattctgaccaaaagtgcaaaccacatcgtggaggaagttcgtctgcgtaag

SEQ ID NO: 264 - protein, 326 aa, Artificial Sequence
  Engineered variant of Pantothenate Kinase from Escherichia coli
MHHHHHHGGSGSIKEQTEMTPYLQLDRNQWAAVRDSNPMTLSEDEIARLKGINEDLSLREVAEVYLPLSRVLNFYISSNLRRQAQLEQFLGTNGQRIPYIISVAGSVAVGKSTFARVLQALLSRWPEHRRVEHISTDGFLLPNQVLKERGLMGKKGFPESYDMHRLMKFVKDLKSGVPNVTAPVYSHLIYDVIPDGDKTVVQPDILILEGLNVLQSGMDYPHDPHHVFVSDFVDFSIYVDAPEDLLQTWYINRFLKLREGAFTDPDSYFHGYAKLTKEEAIKTAMTIWKEMNSVNLKQNILPTRERASLILTKSANHIVEEVRLRK

SEQ ID NO: 265 - DNA, 978 bp, Artificial Sequence
  Engineered variant of Pantothenate Kinase from Escherichia coli
atgcaccatcatcatcatcatggcggtagcggcagcatcaaagagcaggttgagatgaccccgtacctgcaactggaccgtaaccaatgggcggcggtgcgtgatagtaacccgatgaccctgagcgaggacgaaatcgcgcgtctgaagggtattaacgaagatctgagcctggaggaagtggcgctggtctacctgccgctgagccgtgttctgaacttctatattagcagcaatctgcgtcgtcaggcgcagctggaacagtttctgggtaccaatggccagcgtatcccgtatatcattagcgttgcgggtagcgtggcggttggcaaaagcacctttgcgcgtgtgctgcaggcgctgctgagccgttggccggagcatcgtcgtgttgaacatatcagcaccgacggcttcctgctgccgaaccaagtgctgaaggagcgtggtctgatggggaaaaagggtttcccggaaagctacgatatgcctcgtctgatgaaatttgttaaagacctgaagagcggtgtgccgaacgttaccgcgccggtgtacagccacctgatctatgatgttattccggacggcgataaaaccgtggttcagccggacatcctgattctggagggtctgaacgtgctgcaaagcggcatggactatccgcacgatccgcaccacgtgtttgttagcgacttcgtggattttagcatctacgttgacgcgccggaggatctgctgcagacctggtacattaaccgtttcctgaaactgcgtgagggtgcgttcaccgacccggatagctactttcacgggtatgcgaaactgaccaaggaagaggcgatcaaaaccgcgatgaccatttggaaggagatgaacagcgtgaacctgaagcaaaacattctgccgacccgtgaacgtgcgagcctgattttgaccaaaagtgcaaaccacatcgtggaggaagttcgtctgcgtaag

SEQ ID NO: 266 - protein, 326 aa, Artificial Sequence
  Engineered variant of Pantothenate Kinase from Escherichia coli
MHHHHHHGGSGSIKEQVEMTPYLQLDRNQWAAVRDSNPMTLSEDEIARLKGINEDLSLEEVALVYLPLSRVLNFYISSNLRRQAQLEQFLGTNGQRIPYIISVAGSVAVGKSTFARVLQALLSRWPEHRRVEHISTDGFLLPNQVLKERGLMGKKGFPESYDMPRLMKFVKDLKSGVPNVTAPVYSHLIYDVIPDGDKTVVQPDILILEGLNVLQSGMDYPHDPHHVFVSDFVDFSIYVDAPEDLLQTWYINRFLKLREGAFTDPDSYFHGYAKLTKEEAIKTAMTIWKEMNSVNLKQNILPTRERASLILTKSANHIVEEVRLRK

SEQ ID NO: 267 - DNA, 978 bp, Artificial Sequence
  Engineered variant of Pantothenate Kinase from Escherichia coli
atgcaccatcatcatcatcatggcggtagcggcagcatcaaagagcagaccgagctgaccccgtacctgcaactggaccgtaaccaatgggcggcggtgcgtgatagtaacccgatgaccctgagcgaggacgaaatcgcgcgtctgaagggtattaacgaagatctgagcctggaggaagtggcggaagtctacctgccgctgagccgtgttctgaacctgtatatttcgagcaacctgcgtcgtcaggcgcagctggaacagtttctgggtaccaatggccagcgtatcccgtatatcattagcgttgcgggtagcgtggcggttggcaaaagcacctttgcgcgtgtgctgcaggcgctgctgagccgttggccggagcatcgtcgtgttgaacatatcagcaccgacggcttcctgctgccgaaccaaatcctgaaggagcgtggtctgatggggaaaaagggtttcccggaaagctacgatatgcaccgtctgatgaaatttgttaaagacctgaagagcggtgtgccgaacgttaccgcgccggtgtacagccacctgatctatgatgttattccggacggcgataaaaccgtggttcagccggacatcctgattctggagggtctgaacgtgctgcaaagcggcatggactatccgcacgatccgcaccacgtgtttgttagcgacttcgtggattttagcatctacgttgacgcgccggaggatctgctgcagacctggtacattaaccgtttcctgaaactgcgtgagggtgcgttcaccgacccggatagctactttcacgggtatgcgaaactgaccaaggaagaggcgatcaaaaccgcgatgaccatttggaaggagatgaacagcgtgaacctgaagcaaaacattctgccgacccgtgaacgtgcgagcctgattctgaccaaaagtgcaaaccacatcgtggaggaagttcgtctgcgtaag

SEQ ID NO: 268 - protein, 326 aa, Artificial Sequence
  Engineered variant of Pantothenate Kinase from Escherichia coli
MHHHHHHGGSGSIKEQTELTPYLQLDRNQWAAVRDSNPMTLSEDEIARLKGINEDLSLEEVAEVYLPLSRVLNLYISSNLRRQAQLEQFLGTNGQRIPYIISVAGSVAVGKSTFARVLQALLSRWPEHRRVEHISTDGFLLPNQILKERGLMGKKGFPESYDMHRLMKFVKDLKSGVPNVTAPVYSHLIYDVIPDGDKTVVQPDILILEGLNVLQSGMDYPHDPHHVFVSDFVDFSIYVDAPEDLLQTWYINRFLKLREGAFTDPDSYFHGYAKLTKEEAIKTAMTIWKEMNSVNLKQNILPTRERASLILTKSANHIVEEVRLRK

SEQ ID NO: 269 - DNA, 978 bp, Artificial Sequence
  Engineered variant of Pantothenate Kinase from Escherichia coli
atgcaccatcatcatcatcatggcggtagcggcagcatcaaagagcaggttgagatgaccccgtacctgcaactggaccgtaaccaatgggcggcggtgcgtgatagtaacccgatgaccctgagcgaggacgaaaaagcgcgtctgaagggtattaacgaagatctgagcctggaggaagtggcgctggtctacctgccgctgagccgtgttctgaacttctatattagcagcaacctgcgtcgtcaggcgcagctggaacagtttctgggtaccaatggccagcgtatcccgtatatcattagcgttgcgggtagcgtggcggttggcaaaagcacctttgcgcgtgtgctgcaggcgctgctgagccgttggccggagcatcgtcgtgttgaacatatcagcaccgacggcttcctgctgccgaaccaagtgctgaaggagcgtggtctgatggggaaaaagggtttcccggaaagctacgatatgcaccgtctgatgaaatttgttaaagacctgaagagcggtgtgccgaacgttaccgcgccggtgtacagccacctgatctatgatgttattccggacggcgataaaaccgtggttcagccggacatcctgattctggagggtctgaacgtgctgcaaagcggcatggactatccgcacgatccgcaccacgtgtttgttagcgacttcgtggattttagcatctacgttgacgcgccggaggatctgctgcagacctggtacattaaccgtttcctgaaactgcgtgagggtgcgttcaccgacccggatagctactttcacgggtatgcgaaactgaccaaggaagaggcgatcaaaaccgcgatgaccatttggaaggagatgaacagcgtgaacctgaagcaaaacattctgccgacccgtgaacgtgcgagcctgattttgaccaaaagtgcaaaccacatcgtggaggaagttcgtctgcgtaag

SEQ ID NO: 270 - protein, 326 aa, Artificial Sequence
  Engineered variant of Pantothenate Kinase from Escherichia coli
MHHHHHHGGSGSIKEQVEMTPYLQLDRNQWAAVRDSNPMTLSEDEKARLKGINEDLSLEEVALVYLPLSRVLNFYISSNLRRQAQLEQFLGTNGQRIPYIISVAGSVAVGKSTFARVLQALLSRWPEHRRVEHISTDGFLLPNQVLKERGLMGKKGFPESYDMHRLMKFVKDLKSGVPNVTAPVYSHLIYDVIPDGDKTVVQPDILILEGLNVLQSGMDYPHDPHHVFVSDFVDFSIYVDAPEDLLQTWYINRFLKLREGAFTDPDSYFHGYAKLTKEEAIKTAMTIWKEMNSVNLKQNILPTRERASLILTKSANHIVEEVRLRK

SEQ ID NO: 271 - DNA, 978 bp, Artificial Sequence
  Engineered variant of Pantothenate Kinase from Escherichia coli
atgcaccatcatcatcatcatggcggtagcggcagcatcaaagagcagaccgagatgaccccgtacctgcaactggatcgtaaccaatgggccgcgattcgtagtagtaacccgatgaccctgagcgaggacgaaatcgcgcgtctgaagggtattaacgaagatctgagcctggaggaagtggcggaagtctacctgccgctgagccgtgttctgaacttctatgttagcagcaacgagcgtcgtcaggcgcagctggaacagtttctgggtaccaatggccagcgtatcccgtatatcattagcgttgcgggtagcgtggcggttggcaaaagcacctttgcgcgtgtgctgcaggcgctgctgagccgttggtcggagcatcgtcgtgttgaacatatcagcaccgacggcttcctgctgccgaaccaagtgctgaaggagcgtggtctgatggggaaaaagggtttcccggaaagctacgatatgcaccgtctgatgaaatttgttaaagacctgaagagcggtgtgccgaacgttaccgcgccggtgtacagccacctgatctatgatgttattccggacggcgataaaaccgtggttcagccggacatcctgattctggagggtctgaacgtgctgcaaagcggcatggactatgagggggatccgcaccacacttttgttagcgacttcgtggattttagcatctacgttgacgcgccggaggatctgctgcagacctggtacattaaccgtttcctgaaactgcgtgagggtgcgttcaccgacccggatagctactttcacgggtatgcgaaactgaccaaggaagaggcgatcaaaaccgcgatgaccatttggaaggagatgaacagcgtgaacctgaagcaaaacattctgccgacccgtgaacgtgcgagcctgattttgaccaaaagtgcaaaccacatcgtggaggaagttcgtctgcgtaag

SEQ ID NO: 272 - protein, 326 aa, Artificial Sequence
  Engineered variant of Pantothenate Kinase from Escherichia coli
MHHHHHHGGSGSIKEQTEMTPYLQLDRNQWAAIRSSNPMTLSEDEIARLKGINEDLSLEEVAEVYLPLSRVLNFYVSSNERRQAQLEQFLGTNGQRIPYIISVAGSVAVGKSTFARVLQALLSRWSEHRRVEHISTDGFLLPNQVLKERGLMGKKGFPESYDMHRLMKFVKDLKSGVPNVTAPVYSHLIYDVIPDGDKTVVQPDILILEGLNVLQSGMDYEGDPHHTFVSDFVDFSIYVDAPEDLLQTWYINRFLKLREGAFTDPDSYFHGYAKLTKEEAIKTAMTIWKEMNSVNLKQNILPTRERASLILTKSANHIVEEVRLRK

SEQ ID NO: 273 - DNA, 978 bp, Artificial Sequence
  Engineered variant of Pantothenate Kinase from Escherichia coli
atgcaccatcatcatcatcatggcggtagcggcagcatcaaagagcaggttgagatgaccccgtacctgcaactggaccgtaaccaatgggcggcggtggccgatagtaacccgatgaccctgagcgaggacgaaatcgcgcgtctgaagggtattaacgaagatctgagcctggaggaagtggcggaagtctacctgccgctgagccgtgttctgaacttctatattagcagcaacctgcgtcgtcaggcgcagctggaacagtttctgggtaccaatggccagcctatcccgtatatcattagcgttgcgggtagcgtggcggttggcaaaagcacctttgcgcgtgtgctgcaggcgctgctgagccgttggccagagagcggccgcgttgaacatatcagcaccgacggcttcctgctgccgaaccaagtgctgaaggagcgtggtctgatggggaaaaagggtttcccggaaagctacgatatgcctcgtctgatgaaatttgttaaagacctgaagagcggtgtgccgaacgttaccgcgccggtgtacagccacctgatctatgatgttattccggacggcgataaaaccgtggttcagccggacatcctgattctggagggtctgaacgtgctgcaaagcggcatggactatccgcacgatccgcaccacgtgtttgttagcgacttcgtggattttagcatctacgttgacgcgccggaggatctgctgcagacctggtacattaaccgtttcctgaaactgcgtgagggtgcgttcaccgacccggatagctactttcacgggtatgcgaaactgaccaaggaagaggcgatcaaaaccgcgatgaccatttggaaggagatgaacagcgtgaacctgaagcaaaacattctgccgacccgtgaacgtgcgagcctgattttgaccaaaagtgcaaaccacatcgtggaggaagttcgtctgcgtaag

SEQ ID NO: 274 - protein, 326 aa, Artificial Sequence
  Engineered variant of Pantothenate Kinase from Escherichia coli
MHHHHHHGGSGSIKEQVEMTPYLQLDRNQWAAVADSNPMTLSEDEIARLKGINEDLSLEEVAEVYLPLSRVLNFYISSNLRRQAQLEQFLGTNGQPIPYIISVAGSVAVGKSTFARVLQALLSRWPESGRVEHISTDGFLLPNQVLKERGLMGKKGFPESYDMPRLMKFVKDLKSGVPNVTAPVYSHLIYDVIPDGDKTVVQPDILILEGLNVLQSGMDYPHDPHHVFVSDFVDFSIYVDAPEDLLQTWYINRFLKLREGAFTDPDSYFHGYAKLTKEEAIKTAMTIWKEMNSVNLKQNILPTRERASLILTKSANHIVEEVRLRK

SEQ ID NO: 275 - DNA, 978 bp, Artificial Sequence
  Engineered variant of Pantothenate Kinase from Escherichia coli
atgcaccatcatcatcatcatggcggtagcggcagcatcaaagagcagaccgagatgaccccgtacctgcaactggaccgtaaccaatgggcggcggtgcgtgatagtaacccgatgaccctgagcgaggacgaaatcgcgcgtctgaagggtattaacgaagatctgagcctggaggaagtggcggaagtctacctgccgctgagccgtgttctgaacttctatattagcagcaacctgcgtcgtcaggcgcagctggaacagtttctgggtaccaatggccagcgtatcccgtatatcattagcgttgcgggtagcgtggcggttggcaaaagcacctttgcgcgtgtgctgcaggcgctgctgagccgttggccggagcatcgtcgtgttgaacatatcagcaccgacggcttcctgcacccgaaccaagtgctgaaggagcgtggtctgatggggaaaaagggtttcccggaaagctacgatatgcaccgtctgatgaaatttgttaaagacctgaagagcggtgtgccgaacgttaccgcgccggtgtacagccacctgatctatgatgttattccgggtggcggtaaaaccgtggttcagccggacatcctgattctggagggtctgaacgtgctgcaaagcggctgcgactatccgcacgatccgcatcacgtgtttgttagcgacttcgtggattttagcatctacgttgacgcgccggaggatctgctgcagacctggtacattaaccgtttcctgaaactgcgtgagggtgcgttcaccgacccggatagctactttcacgggtatgcgaagctgaccaaggaagaggcgatcaaaaccgcgatgaccatttggaaggagatgaacagcgtgaacctgaagcaaaacattctgccgacccgtgaacgtgcgtcgctgattttgaccaaaagtgcaaaccacatcgtggaggaagttcgtctgcgtaag

SEQ ID NO: 276 - protein, 326 aa, Artificial Sequence
  Engineered variant of Pantothenate Kinase from Escherichia coli
MHHHHHHGGSGSIKEQTEMTPYLQLDRNQWAAVRDSNPMTLSEDEIARLKGINEDLSLEEVAEVYLPLSRVLNFYISSNLRRQAQLEQFLGTNGQRIPYIISVAGSVAVGKSTFARVLQALLSRWPEHRRVEHISTDGFLHPNQVLKERGLMGKKGFPESYDMHRLMKFVKDLKSGVPNVTAPVYSHLIYDVIPGGGKTVVQPDILILEGLNVLQSGCDYPHDPHHVFVSDFVDFSIYVDAPEDLLQTWYINRFLKLREGAFTDPDSYFHGYAKLTKEEAIKTAMTIWKEMNSVNLKQNILPTRERASLILTKSANHIVEEVRLRK

SEQ ID NO: 277 - DNA, 978 bp, Artificial Sequence
  Engineered variant of Pantothenate Kinase from Escherichia coli
atgcaccatcatcatcatcatggcggtagcggcagcatcaaagagcagaccgagatgaccccgtacctgcaactggatcgtaaccaatggcgtgcggttcgtgacagtaacccgatgaccctgagcgaggacgaaatcgcgcgtctgaagggtattaacgaagatctgagcctggaggaagtggcggaagtctacctgccgctgagccgtgttctgaacttctatgttagcagcgccctgcgtcgtcaggcgcagctggaacagtttctgggtaccaatggccagcgtatcccgtatatcattagcgttgcgggtagcgtggcggttggcaaaagcacctttgcgcgtgtgctgcagacgctgctgagccgttggtcggagcatcgtcgtgttgaacatatcagcaccgacggcttcctgctgccgaaccaagtgctgaaggagcgtggtctgatggggaaaaagggtttcccggaaagctacgatatgcaccgtctgatgaaatttgttaaagacctgaagagcggtgtgccgaacgttaccgcgccggtgtacagccacctgatctatgatgttattcctgacggcgataaaaccgtggttcagccggacatcctgattctggagggtctgaacgtgctgcaaagcggcatggactatccgcacgatccgcaccacgtgtttgttagcgacttcgtggattttagcatctacgttgacgcgccggaggatctgctgcagacctggtacattaaccgtttcctgaaactgcgtgagggtgcgttcaccgacccggatagctactttcacgggtatgcgaaactgaccaaggaagaggcgatcaaaaccgcgatgaccatttggaaggagatgaacctggtgaacctgaagcaaaacattctgccgacccgtgaacgtgcgagcctgattctgaccaaaagtgcgaaccacatcgtggaggaagttcgtctgcgtaag

SEQ ID NO: 278 - protein, 326 aa, Artificial Sequence
  Engineered variant of Pantothenate Kinase from Escherichia coli
MHHHHHHGGSGSIKEQTEMTPYLQLDRNQWRAVRDSNPMTLSEDEIARLKGINEDLSLEEVAEVYLPLSRVLNFYVSSALRRQAQLEQFLGTNGQRIPYIISVAGSVAVGKSTFARVLQTLLSRWSEHRRVEHISTDGFLLPNQVLKERGLMGKKGFPESYDMHRLMKFVKDLKSGVPNVTAPVYSHLIYDVIPDGDKTVVQPDILILEGLNVLQSGMDYPHDPHHVFVSDFVDFSIYVDAPEDLLQTWYINRFLKLREGAFTDPDSYFHGYAKLTKEEAIKTAMTIWKEMNLVNLKQNILPTRERASLILTKSANHIVEEVRLRK

SEQ ID NO: 279 - DNA, 978 bp, Artificial Sequence
  Engineered variant of Pantothenate Kinase from Escherichia coli
atgcaccatcatcatcatcatggcggtagcggcagcatcaaagagcagaccgagatgactccgtacctgcaactggaccgtaaccaatgggcggcggtgcgtgatagtaacccgatgaccctgagcgaggacgaaatcgcgcgtctgaagggtattaacgaagatctgagcctggaggaagtggcggaagtctacctgccgctgagccgtgttctgaacttctatattagcagcaacctgcgtcgtcaggcgcagctggaacagtttctgggtaccaacggccagcgtatcccgtatatcattagcgttgcgggtagcgtggcggttggcaaaagcacctttgcgcgtgtgctgcaggttctgctgagccgttggccggagcatcgtcgtgttgaacatatcagcaccgacggcttcctgctgccgaaccaagtgctgaaggagcgtggtctgatggggaaaaagggtttcccggaaagctacgatatgagccgtctgatgaaatttgttaaagacctgaagagcggtgtgccgaacgttaccgcgccggtgtacagccacctgatctatgatgttattccggacggcgataaaaccgtggttcagccggacatcctgattctggagggtctgaacgtgctgcaaagcggcatggactatccgcacgatccgcaccacgtgtttgttagcgacttcgtggattttagcatctacgttgacgcgccggaggatctgctgcagacctggtacattaaccgtttcctgaaactgcgtgagggtgcgttcaccgacccggatagctactttcacgggtatgcgaaactgaccaaggaagaggcgatcgctaccgcgatgaccatttggaaggagatgaacagcgtgaacctgaagcaaaacattctgccgacccgtgaacgtgcgagcctgattttgaccaaaagtgcaaaccacatcgtggaactggttcgtctgcgtaag

SEQ ID NO: 280 - protein, 326 aa, Artificial Sequence
  Engineered variant of Pantothenate Kinase from Escherichia coli
MHHHHHHGGSGSIKEQTEMTPYLQLDRNQWAAVRDSNPMTLSEDEIARLKGINEDLSLEEVAEVYLPLSRVLNFYISSNLRRQAQLEQFLGTNGQRIPYIISVAGSVAVGKSTFARVLQVLLSRWPEHRRVEHISTDGFLLPNQVLKERGLMGKKGFPESYDMSRLMKFVKDLKSGVPNVTAPVYSHLIYDVIPDGDKTVVQPDILILEGLNVLQSGMDYPHDPHHVFVSDFVDFSIYVDAPEDLLQTWYINRFLKLREGAFTDPDSYFHGYAKLTKEEAIATAMTIWKEMNSVNLKQNILPTRERASLILTKSANHIVELVRLRK

SEQ ID NO: 281 - DNA, 978 bp, Artificial Sequence
  Engineered variant of Pantothenate Kinase from Escherichia coli
atgcaccatcatcatcatcatggcggtagcggcagcatcaaagagcagaccgagatgaccccgtacctgcaactggatcgtaaccaatggcgtgcgattcgtagtagtaacccgatgaccctgagcgaggacgaaatcgcgcgtctgaagggtattaacgaagatctgagcctggaggaagtggcggaagtctacctgccgctgagccgtgttctgaacttctatattagcagcaacctgcgtcgtcaggcgcagctggaacagtttctgggtaccaatggtcagcgtatcccgtatatcattagcgttgcgggtagcgtggcggttggcaaaagcacctttgcgcgtgtgctgcagacgctgctgagccgttggtcggagcatcgtcgtgttgaacatatcagcaccgacggcttcctgctgccgaaccaagtgctgaaggagcgtggtctgatggggaaaaagggtttcccggaaagctacgatatgcaccgtctgatgaaatttgttaaagacctgaagagcggtgtgccgaacgttaccgcgccggtgtacagccacctgatctatgatgttattccggacggcgataaaaccgtggttcagccggacatcctgattctggagggtctgaacgtgctgcaaagcggcatggactatcctcatgatccgcaccacacttttgttagcgacttcgtggattttagcatctacgttgacgcgccggaggatctgctgcagacctggtacattaaccgtttcctgaaactgcgtgagggtgcgttcaccgacccggatagctactttcacgggtatgcgaaactgaccaaggaagaggcgatcaaaaccgcgatgaccatttggaaggagatgaacagcgtgaacctgaagcaaaacattctgccgacccgtgaacgtgcgagcctgattttgaccaaaagtgcaaaccacatcgtggaggaagttcgtctgcgtaag

SEQ ID NO: 282 - protein, 326 aa, Artificial Sequence
  Engineered variant of Pantothenate Kinase from Escherichia coli
MHHHHHHGGSGSIKEQTEMTPYLQLDRNQWRAIRSSNPMTLSEDEIARLKGINEDLSLEEVAEVYLPLSRVLNFYISSNLRRQAQLEQFLGTNGQRIPYIISVAGSVAVGKSTFARVLQTLLSRWSEHRRVEHISTDGFLLPNQVLKERGLMGKKGFPESYDMHRLMKFVKDLKSGVPNVTAPVYSHLIYDVIPDGDKTVVQPDILILEGLNVLQSGMDYPHDPHHTFVSDFVDFSIYVDAPEDLLQTWYINRFLKLREGAFTDPDSYFHGYAKLTKEEAIKTAMTIWKEMNSVNLKQNILPTRERASLILTKSANHIVEEVRLRK

SEQ ID NO: 283 - DNA, 978 bp, Artificial Sequence
  Engineered variant of Pantothenate Kinase from Escherichia coli
atgcaccatcatcatcatcatggcggtagcggcagcatcaaagagcagaccgagatgggtccgtacctgcaactggaccgtaaccaatgggcggcggtgcgtgatagtaacccgatgaccctgagcgaggacgaaatcgcgcgtctgaagggtattaacgaagatctgagcctggcggaagtggcggaagtctacctgccgctgagccgtgttctgaacttctatattagcagcaacctgcgtcgtcaggcgcagctggaacagtttctgggtaccgggggccagcgtatcccgtatatcattagcgttgcgggtagcgtggcggttggcaaaagcacctttgcgcgtgtgctgcaggcgctgctgagccgttggccggagcatcgtcgtgttgaacatatcagcaccgacggcttcctgcacccgaaccaagtgctgaaggagcgtggtctgatggggaaaaagggtttcccggaaagctacgatatgcaccgtctgatgaaatttgttaaagacctgaagagcggtgtgccgaacgttaccgcgccggtgtacagccacctgatctatgatgttattccggacggcgataaaaccgtggttcagccggacatcctgattctggagggtctgaacgtgctgcaaagcggcatggactatccacacgatccgcaccacgtgtttgttagcgacttcgtggattttagcatctacgttgacgcaccggaggatctgctgcagacctggtacattaaccgtttcctgaaactgcgtgagggtgcgttcaccgacccggatagctactttcacgggtatgcgaaactgaccaaggaagaggcgatcaaaaccgcgatgaccatttggaaggagatgaacagcgtgaacctgaagcaaaacattctgccgacccgtgaacgtgcgagcctgattctgaccaaaagtgcaaaccacatcgtggaactggttcgtctgcgtaag

SEQ ID NO: 284 - protein, 326 aa, Artificial Sequence
  Engineered variant of Pantothenate Kinase from Escherichia coli
MHHHHHHGGSGSIKEQTEMGPYLQLDRNQWAAVRDSNPMTLSEDEIARLKGINEDLSLAEVAEVYLPLSRVLNFYISSNLRRQAQLEQFLGTGGQRIPYIISVAGSVAVGKSTFARVLQALLSRWPEHRRVEHISTDGFLHPNQVLKERGLMGKKGFPESYDMHRLMKFVKDLKSGVPNVTAPVYSHLIYDVIPDGDKTVVQPDILILEGLNVLQSGMDYPHDPHHVFVSDFVDFSIYVDAPEDLLQTWYINRFLKLREGAFTDPDSYFHGYAKLTKEEAIKTAMTIWKEMNSVNLKQNILPTRERASLILTKSANHIVELVRLRK

SEQ ID NO: 285 - DNA, 978 bp, Artificial Sequence
  Engineered variant of Pantothenate Kinase from Escherichia coli
atgcaccatcatcatcatcatggcggtagcggcagcatcaaagagcagaccgagatgaccccgtacctgcaactggaccgtaaccaatgggcggcggtgcgtcgcagtaacccgatgaccctgagcgaggacgaaatcgcgcgtctgaagggtattaacgaagatctgagcctggaggaagtggcggaagtctacctgccgctgagccgtgttctgaacttctatattagcagcaacctgcgtcgtcaggcgcagctggaacagtttctgggtaccaatggccagcgtatcccgtatatcattagcgttgcgggtagcgtggcggttggcaaaagcacctttgcgcgtgtgctgcaggcgctgctgagccgttggccggagcatcgtcgtgttgaacatatcagcaccgacggcttcctgctgccgaaccaaatcctgaaggagcgtggtctgatggggaaaaagggtttcccggaaagctacgatatgcaccgtctgatgaaatttgttaaagacctgaagagcggtgtgccgaacgttaccgcgccggtgtacagccacctgatctatgatgttattccggacggcgataaaaccgtggttcagccggacatcctgattctggagggtctgaacgtgctgcaaagcggcatggactatccgcacgatccgcatcacgtgtttgttagcgacttcgtggattttagcatctacgttgacgcgccggaggatctgctgcagacctggtacattaaccgtttcctgaaactgcgtgagggtgcgttcaccgacccggatagctactttcacgggtatgcgaagctgaccaaggaagaggcgatcaaaaccgcgatggatatttggaaggagatgaacagcgtgaacctgaagcaaaacattctgccgacccgtgaacgtgcgagcctgattctgaccaaaagtgcaaaccacatcgtggaggaagttcgtctgcgtaag

SEQ ID NO: 286 - protein, 326 aa, Artificial Sequence
  Engineered variant of Pantothenate Kinase from Escherichia coli
MHHHHHHGGSGSIKEQTEMTPYLQLDRNQWAAVRRSNPMTLSEDEIARLKGINEDLSLEEVAEVYLPLSRVLNFYISSNLRRQAQLEQFLGTNGQRIPYIISVAGSVAVGKSTFARVLQALLSRWPEHRRVEHISTDGFLLPNQILKERGLMGKKGFPESYDMHRLMKFVKDLKSGVPNVTAPVYSHLIYDVIPDGDKTVVQPDILILEGLNVLQSGMDYPHDPHHVFVSDFVDFSIYVDAPEDLLQTWYINRFLKLREGAFTDPDSYFHGYAKLTKEEAIKTAMDIWKEMNSVNLKQNILPTRERASLILTKSANHIVEEVRLRK

SEQ ID NO: 287 - DNA, 978 bp, Artificial Sequence
  Engineered variant of Pantothenate Kinase from Escherichia coli
atgcaccatcatcatcatcatggcggtagcggcagcatcaaagagcagaccgagatgaccccgtacctgcaactggaccgtaaccaatgggcggcggtgcgtgatagtaacccgatgaccctgagcgaggacgaaatcgcgcgtctgaagggtattaacgaagatctgagcctggaggaagtggcggaagtctacctgccgctgagccgtgttctgaacttctatattagcagcaacctgcgtcgtcaggcgcagctggaacagtttctgggtaccaatggccagcgtatcccgtatatcattagcgttgcgggtagcgtggcggttggcaaaagcacctttgcgcgtgtgctgcaggcgctgctgagccgttggccggagcatcgtcgtgttgaacatatcagcaccgacggcttcctgctgccgaaccaagtgctgaaggagcgtggtctgatggggaaaaagggtttcccggaaagctacgatatgcaccgtctgatgaaatttgttaaagacctgaagagcggtgtgccgaacgttaccgcgccggtgtacagccacctgatctatgatgttattccggacggcgataaaaccgtggttcagccggacatcctgattctggagggtctgaacgtgctgcaaagcggcatggactatccgcacgatccgcaccacgtgtttgttagcgacttcgtggattttagcatctacgttgacgcgccggaggatctgctgcagacctggtacattaaccgtttcctgaaactgcgtgagggtgcgttcaccgacccggatagctactttcacgggtatgcgaagctgaccaaggaagaggcgatcaaaaccgcgatgaccatttggaaggagatgaacagcgtgaacctgaagcaaaacattctgccgacccgtgaacgtgcggcgctgattttgaccaaaagtgcaaaccacatcgtggaggaagttcgtctgcgtaag

SEQ ID NO: 288 - protein, 326 aa, Artificial Sequence
  Engineered variant of Pantothenate Kinase from Escherichia coli
MHHHHHHGGSGSIKEQTEMTPYLQLDRNQWAAVRDSNPMTLSEDEIARLKGINEDLSLEEVAEVYLPLSRVLNFYISSNLRRQAQLEQFLGTNGQRIPYIISVAGSVAVGKSTFARVLQALLSRWPEHRRVEHISTDGFLLPNQVLKERGLMGKKGFPESYDMHRLMKFVKDLKSGVPNVTAPVYSHLIYDVIPDGDKTVVQPDILILEGLNVLQSGMDYPHDPHHVFVSDFVDFSIYVDAPEDLLQTWYINRFLKLREGAFTDPDSYFHGYAKLTKEEAIKTAMTIWKEMNSVNLKQNILPTRERAALILTKSANHIVEEVRLRK

SEQ ID NO: 289 - DNA, 978 bp, Artificial Sequence
  Engineered variant of Pantothenate Kinase from Escherichia coli
atgcaccatcatcatcatcatggcggtagcggcagcatcaaagagcagaccgagatgaccccgtacctgcaactggaccgtaaccaatgggcggcggtggccgatagtaacccgatgaccctgagcgaggacgaaaaagcgcgtctgaagggtattaacgaagatctgagcctggaggaagtggcgctggtctacctgccgctgagccgtgttctgaacttctatattagcagcaacctgcgtcgtcaggcgcagctggaacagtttctgggtaccaatggccagcgtatcccgtatatcattagcgttgcgggtagcgtggcggttggcaaaagcacctttgcgcgtgtgctgcaggcgctgctgagccgttggccggagcatcgtcgtgttgaacatatcagcaccgacggcttcctgctgccgaaccaagtgctgaaggagcgtggtctgatggggaaaaagggtttcccggaaagctacgatatgcctcgtctgatgaaatttgttaaagacctgaagagcggtgtgccgaacgttaccgcgccggtgtacagccacctgatctatgatgttatcccggacggcgataaaaccgtggttcagccggacatcctgattctggagggtctgaacgtgctgcaaagcggcatggactatccgcacgatccgcaccacgtgtttgttagcgacttcgtggattttagcatctacgttgacgcgccggaggatctgctgcagacctggtacattaaccgtttcctgaaactgcgtgagggtgcgttcaccgacccggatagctactttcacgggtatgcgaaactgaccaaggaagaggcgatcaaaaccgcgatgaccatttggaaggagatgaacagcgtgaacctgaagcaaaacattctgccgacccgtgaacgtgcgagcctgattctgaccaaaagtgcaaaccacatcgtggaggaagttcgtctgcgtaag

SEQ ID NO: 290 - protein, 326 aa, Artificial Sequence
  Engineered variant of Pantothenate Kinase from Escherichia coli
MHHHHHHGGSGSIKEQTEMTPYLQLDRNQWAAVADSNPMTLSEDEKARLKGINEDLSLEEVALVYLPLSRVLNFYISSNLRRQAQLEQFLGTNGQRIPYIISVAGSVAVGKSTFARVLQALLSRWPEHRRVEHISTDGFLLPNQVLKERGLMGKKGFPESYDMPRLMKFVKDLKSGVPNVTAPVYSHLIYDVIPDGDKTVVQPDILILEGLNVLQSGMDYPHDPHHVFVSDFVDFSIYVDAPEDLLQTWYINRFLKLREGAFTDPDSYFHGYAKLTKEEAIKTAMTIWKEMNSVNLKQNILPTRERASLILTKSANHIVEEVRLRK

SEQ ID NO: 291 - DNA, 978 bp, Artificial Sequence
  Engineered variant of Pantothenate Kinase from Escherichia coli
atgcaccatcatcatcatcatggcggtagcggcagcatcaaagagcaggttgagatgaccccgtacctgcaactggaccgtaaccaatgggcggcggtgcgtgatagtaacccgatgaccctgagcgaggacgaaaaagcgcgtctgaagggtattaacgaagatctgagcctggaggaagtggcgctggtctacctgccgctgagccgtgttctgaacttctatattagcagcaacctgcgtcgtcaggcgcagctggaacagtttctgggtaccaatggccagcctatcccgtatatcattagcgttgcgggtagcgtggcggttggcaaaagcacctttgcgcgtgtgctgcaggcgctgctgagccgttggccggagcatcgtcgtgttgaacatatcagcaccgacggcttcctgctgccgaaccaagtgctgaaggagcgtggtctgatggggaaaaagggtttcccggaaagctacgatatgcatcgtctgatgaaatttgttaaagacctgaagagcggtgtgccgaacgttaccgcgccggtgtacagccacctgatctatgatgttattccggacggcgataaaaccgtggttcagccggacatcctgattctggagggtctgaacgtgctgcaaagcggcatggactatccgcacgatccgcaccacgtgtttgttagcgacttcgtggattttagcatctacgttgacgcgccggaggatctgctgcagacctggtacattaaccgtttcctgaaactgcgtgagggtgcgttcaccgacccggatagctactttcacgggtatgcgaaactgaccaaggaagaggcgatcaaaaccgcgatgaccatttggaaggagatgaacagcgtgaacctgaagcaaaacattctgccgacccgtgaacgtgcgagcctgattttgaccaaaagtgcaaaccacatcgtggaggaagttcgtctgcgtaag

SEQ ID NO: 292 - protein, 326 aa, Artificial Sequence; identical to SEQ ID NO: 248
  Engineered variant of Pantothenate Kinase from Escherichia coli

SEQ ID NO: 293 - DNA, 978 bp, Artificial Sequence
  Engineered variant of Pantothenate Kinase from Escherichia coli
atgcaccatcatcatcatcatggcggtagcggcagcatcaaagagcagaccgagatgaccccgtacctgcaactggaccgtaaccaatgggcggcggtgcgtcgcagtaacccgatgaccctgagcgaggacgaaatcgcgcgtctgaagggtattaacgaagatctgagcctggaggaagtggcggaagtctacctgccgctgagccgtgttctgaacttctatattagcagcaacctgcgtcgtcaggcgcagctggaacagtttctgggtaccaatggccagcgtatcccgtatatcattagcgttgcgggtagcgtggcggttggcaaaagcacctttgcgcgtgtgctgcaggcgctgctgagccgttggccggagcatcgtcgtgttgaacatatcagcaccgacggcttcctgctgccgaaccaagtgctgaaggagcgtggtctgatggggaaaaagggtttcccggaaagctacgatatgcaccgtctgatgaaatttgttaaagacctgaagagcggtgtgccgaacgttaccgcgccggtgtacagccacctgatctatgatgttattccggacggcgataaaaccgtggttcagccggacatcctgattctggagggtctgaacgtgctgcaaagcggcatggactatccgcacgatccgcaccacgtgtttgttagcgacttcgtggattttagcatctacgttgacgcgccggaggatctgctgcagacctggtacattaaccgtttcctgaaactgcgtgagggtgcgttcaccgacccggatagctactttcacgggtatgcgaaactgaccaaggaagaggcgatcaaaaccgcgatgaccatttggaaggagatgaacagcgtgaacctgaagcaaaacattctgccgacccgtgaacgtgcgtcgctgattttgaccaaaagtgcaaaccacatcgtggaggaagttcgtctgcgtaag

SEQ ID NO: 294 - protein, 326 aa, Artificial Sequence
  Engineered variant of Pantothenate Kinase from Escherichia coli
MHHHHHHGGSGSIKEQTEMTPYLQLDRNQWAAVRRSNPMTLSEDEIARLKGINEDLSLEEVAEVYLPLSRVLNFYISSNLRRQAQLEQFLGTNGQRIPYIISVAGSVAVGKSTFARVLQALLSRWPEHRRVEHISTDGFLLPNQVLKERGLMGKKGFPESYDMHRLMKFVKDLKSGVPNVTAPVYSHLIYDVIPDGDKTVVQPDILILEGLNVLQSGMDYPHDPHHVFVSDFVDFSIYVDAPEDLLQTWYINRFLKLREGAFTDPDSYFHGYAKLTKEEAIKTAMTIWKEMNSVNLKQNILPTRERASLILTKSANHIVEEVRLRK

SEQ ID NO: 295 - DNA, 978 bp, Artificial Sequence
  Engineered variant of Pantothenate Kinase from Escherichia coli
atgcaccatcatcatcatcatggcggtagcggcagcatcaaagagcaggttgagatgaccccgtacctgcaactggaccgtaaccaatgggcggcggtgcgtgatagtaacccgatgaccctgagcgaggacgaaatcgcgcgtctgaagggtattaacgaagatctgagcctggaggaagtggcgctggtctacctgccgctgagccgtgttctgaacttctatattagcagcaacctgcgtcgtcaggcgcagctggaacagtttctgggtaccaatggccagcctatcccgtatatcattagcgttgcgggtagcgtggcggttggcaaaagcacctttgcgcgtgtgctgcaggcgctgctgagccgttggccggagcatcgtcgtgttgaacatatcagcaccgacggcttcctgctgccgaaccaagtgctgaaggagcgtggtctgatggggaaaaagggtttcccggaaagctacgatatgcctcgtctgatgaaatttgttaaagacctgaagagcggtgtgccgaacgttaccgcgccggtgtacagccacctgatctatgatgttattccggacggcgataaaaccgtggttcagccggacatcctgattctggagggtctgaacgtgctgcaaagcggcatggactatccgcacgatccgcaccacgtgtttgttagcgacttcgtggattttagcatctacgttgacgcgccggaggatctgctgcagacctggtacattaaccgtttcctgaaactgcgtgagggtgcgttcaccgacccggatagctactttcacgggtatgcgaaactgaccaaggaagaggcgatcaaaaccgcgatgaccatttggaaggagatgaacagcgtgaacctgaagcaaaacattctgccgacccgtgaacgtgcgagcctgattttgaccaaaagtgcaaaccacatcgtggaggaagttcgtctgcgtaag

SEQ ID NO: 296 - protein, 326 aa, Artificial Sequence
  Engineered variant of Pantothenate Kinase from Escherichia coli
MHHHHHHGGSGSIKEQVEMTPYLQLDRNQWAAVRDSNPMTLSEDEIARLKGINEDLSLEEVALVYLPLSRVLNFYISSNLRRQAQLEQFLGTNGQPIPYIISVAGSVAVGKSTFARVLQALLSRWPEHRRVEHISTDGFLLPNQVLKERGLMGKKGFPESYDMPRLMKFVKDLKSGVPNVTAPVYSHLIYDVIPDGDKTVVQPDILILEGLNVLQSGMDYPHDPHHVFVSDFVDFSIYVDAPEDLLQTWYINRFLKLREGAFTDPDSYFHGYAKLTKEEAIKTAMTIWKEMNSVNLKQNILPTRERASLILTKSANHIVEEVRLRK

SEQ ID NO: 297 - DNA, 978 bp, Artificial Sequence
  Engineered variant of Pantothenate Kinase from Escherichia coli
atgcaccatcatcatcatcatggcggtagcggcagcatcaaagagcaggttgagatgaccccgtacctgcaactggaccgtaaccaatgggcggcggtgcgtgatagtaacccgatgaccctgagcgaggacgaaaaagcgcgtctgaagggtattaacgaagatctgagcctggaggaagtggcggaagtctacctgccgctgagccgtgttctgaacttctatattagcagcaacctgcgtcgtcaggcgcagctggaacagtttctgggtaccaatggccagcgtatcccgtatatcattagcgttgcgggtagcgtggcggttggcaaaagcacctttgcgcgtgtgctgcaggcgctgctgagccgttggccggagcatcgtcgtgttgaacatatcagcaccgacggcttcctgctgccgaaccaagtgctgaaggagcgtggtctgatggggaaaaagggtttcccggaaagctacgatatgcctcgtctgatgaaatttgttaaagacctgaagagcggtgtgccgaacgttaccgcgccggtgtacagccacctgatctatgatgttatcccggacggcgataaaaccgtggttcagccggacatcctgattctggagggtctgaacgtgctgcaaagcggcatggactatccgcacgatccgcaccacgtgtttgttagcgacttcgtggattttagcatctacgttgacgcgccggaggatctgctgcagacctggtacattaaccgtttcctgaaactgcgtgagggtgcgttcaccgacccggatagctactttcacgggtatgcgaaactgaccaaggaagaggcgatcaaaaccgcgatgaccatttggaaggagatgaacagcgtgaacctgaagcaaaacattctgccgacccgtgaacgtgcgagcctgattctgaccaaaagtgcaaaccacatcgtggaggaagttcgtctgcgtaag

SEQ ID NO: 298 - protein, 326 aa, Artificial Sequence
  Engineered variant of Pantothenate Kinase from Escherichia coli
MHHHHHHGGSGSIKEQVEMTPYLQLDRNQWAAVRDSNPMTLSEDEKARLKGINEDLSLEEVAEVYLPLSRVLNFYISSNLRRQAQLEQFLGTNGQRIPYIISVAGSVAVGKSTFARVLQALLSRWPEHRRVEHISTDGFLLPNQVLKERGLMGKKGFPESYDMPRLMKFVKDLKSGVPNVTAPVYSHLIYDVIPDGDKTVVQPDILILEGLNVLQSGMDYPHDPHHVFVSDFVDFSIYVDAPEDLLQTWYINRFLKLREGAFTDPDSYFHGYAKLTKEEAIKTAMTIWKEMNSVNLKQNILPTRERASLILTKSANHIVEEVRLRK

SEQ ID NO: 299 - DNA, 978 bp, Artificial Sequence
  Engineered variant of Pantothenate Kinase from Escherichia coli
atgcaccatcatcatcatcatggcggtagcggcagcatcaaagagcaggttgagatgaccccgtacctgcaactggaccgtaaccaatgggcggcggtgcgtgatagtaacccgatgaccctgagcgaggacgaaatcgcgcgtctgaagggtattaacgaagatctgagcctggaggaagtggcgctggtctacctgccgctgagccgtgttctgaacttctatattagcagcagtctgcgtcgtcaggcgcagctggaacagtttctgggtaccaatggccagcgtatcccgtatatcattagcgttgcgggtagcgtggcggttggcaaaagcacctttgcgcgtgtgctgcaggcgctgctgagccgttggccagagagcggctacgttgaacatatcagcaccgacggcttcctgctgccgaaccaagtgctgaaggagcgtggtctgatggggaaaaagggtttcccggaaagctacgatatgcctcgtctgatgaaatttgttaaagacctgaagagcggtgtgccgaacgttaccgcgccggtgtacagccacctgatctatgatgttattccggacggcgataaaaccgtggttcagccggacatcctgattctggagggtctgaacgtgctgcaaagcggcatggactatccgcacgatccgcaccacgtgtttgttagcgacttcgtggattttagcatctacgttgacgcgccggaggatctgctgcagacctggtacattaaccgtttcctgaaactgcgtgagggtgcgttcaccgacccggatagctactttcacgggtatgcgaaactgaccaaggaagaggcgatcaaaaccgcgatgaccatttggaaggagatgaacagcgtgaacctgaagcaaaacattctgccgacccgtgaacgtgcgagcctgattttgaccaaaagtgcaaaccacatcgtggaggaagttcgtctgcgtaag

SEQ ID NO: 300 - protein, 326 aa, Artificial Sequence
  Engineered variant of Pantothenate Kinase from Escherichia coli
MHHHHHHGGSGSIKEQVEMTPYLQLDRNQWAAVRDSNPMTLSEDEIARLKGINEDLSLEEVALVYLPLSRVLNFYISSSLRRQAQLEQFLGTNGQRIPYIISVAGSVAVGKSTFARVLQALLSRWPESGYVEHISTDGFLLPNQVLKERGLMGKKGFPESYDMPRLMKFVKDLKSGVPNVTAPVYSHLIYDVIPDGDKTVVQPDILILEGLNVLQSGMDYPHDPHHVFVSDFVDFSIYVDAPEDLLQTWYINRFLKLREGAFTDPDSYFHGYAKLTKEEAIKTAMTIWKEMNSVNLKQNILPTRERASLILTKSANHIVEEVRLRK

SEQ ID NO: 301 - DNA, 978 bp, Artificial Sequence
  Engineered variant of Pantothenate Kinase from Escherichia coli
atgcaccatcatcatcatcatggcggtagcggcagcatcaaagagcagaccgagatgaccccgtacctgcaactggaccgtaaccaatgggcggcggtgcgtgatagtaacccgatgaccctgagcgaggacgaaatcgcgcgtctgaagggtattaacgaagatctgagcctggaggaagtggcggaagtctacctgccgctgagccgtgttctgaacttctatattagcagcaacctgcgtcgtcaggcgcagctggaacagtttctgggtaccaatggccagcgtatcccgtatatcattagcgttgcgggtagcgtggcggttggcaaaagcacctttgcgcgtgtgctgcaggcgctgctgagccgttggccggagcatcgtcgtgttgaacatatcagcaccgacggcttcctgctgccgaaccaagtgctgaaggagcgtggtctgatggggaaaaagggtttcccggaaagctacgatatgcaccgtctgatgaaatttgttaaagacctgaagagcggtgtgccgaacgttaccgcgccggtgtacagccacctgatctatgatgttattccggacggcgataaaaccgtggttcagccggacatcctgattctggagggtctgaacgtgctgcaaagcggctgcgactatccgcacgatccgcaccacgtgtttgttagcgacttcgtggattttagcatctacgttgacgcgccggaggatctgctgcagacctggtacattaaccgtttcctgaaactgcgtgagggtgcgttcaccgacccggatagctactttcacgggtatgcgaaactgaccaaggaagaggcgatcaaaaccgcgatgaccatttggaaggagatgaacagcgtgaacctgaagcaaaacattctgccgacccgtgaacgtgcgagcctgattctgaccaaaagtgcaaaccacatcgtggaggaagttcgtctgcgtaag

SEQ ID NO: 302 - protein, 326 aa, Artificial Sequence
  Engineered variant of Pantothenate Kinase from Escherichia coli
MHHHHHHGGSGSIKEQTEMTPYLQLDRNQWAAVRDSNPMTLSEDEIARLKGINEDLSLEEVAEVYLPLSRVLNFYISSNLRRQAQLEQFLGTNGQRIPYIISVAGSVAVGKSTFARVLQALLSRWPEHRRVEHISTDGFLLPNQVLKERGLMGKKGFPESYDMHRLMKFVKDLKSGVPNVTAPVYSHLIYDVIPDGDKTVVQPDILILEGLNVLQSGCDYPHDPHHVFVSDFVDFSIYVDAPEDLLQTWYINRFLKLREGAFTDPDSYFHGYAKLTKEEAIKTAMTIWKEMNSVNLKQNILPTRERASLILTKSANHIVEEVRLRK

SEQ ID NO: 303 - DNA, 978 bp, Artificial Sequence
  Engineered variant of Pantothenate Kinase from Escherichia coli
atgcaccatcatcatcatcatggcggtagcggcagcatcaaagagcagaccgagatgaccccgtacctgcaactggaccgtaaccaatgggcggcggtgcgtgatagtaacccgatgaccctgagcgaggacgaaatcgcgcgtctgaagggtattaacgaagatctgagcctggaggaagtggcggaagtctacctgccgctgagccgtgttctgaacttctatattagcagcaacctgcgtcgtcaggcgcagctggaacagtttctgggtaccaatggccagcgtatcccgtatatcattagcgttgcgggtagcgtggcggttggcaaaagcacctttgcgcgtgtgctgcaggcgctgctgagccgttggccggagcatcgtcgtgttgaacatatcagcaccgacggcttcctgctgccgaaccaagtgctgaaggagcgtggtctgatggggaaaaagggtttcccggaaagctacgatatgcaccgtctgatgaaatttgttaaagacctgaagagcggtgtgccgaacgttaccgcgccggtgtacagccacctgatctatgatgttattccggacggcgataaaaccgtggttcagccggacatcctgattctggagggtctgaacgtgctgcaaagcggcatggactatccgcacgatccgtatcacgtgtttgttagcgacttcgtggattttagcatctacgttgacgcgccggaggatctgctgcagacctggtacattaaccgtttcctgaaactgcgtgagggtgcgttcaccgacccggatagctactttcacgggtatgcgaagctgaccaaggaagaggcgatcaaaaccgcgatgaccatttggaaggagatgaacagcgtgaacctgaagcaaaacattctgccgacccgtgaacgtgcgtcgctgattttgaccaaaagtgcaaaccacatcgtggaggaagttcgtctgcgtaag

SEQ ID NO: 304 - protein, 326 aa, Artificial Sequence
  Engineered variant of Pantothenate Kinase from Escherichia coli
MHHHHHHGGSGSIKEQTEMTPYLQLDRNQWAAVRDSNPMTLSEDEIARLKGINEDLSLEEVAEVYLPLSRVLNFYISSNLRRQAQLEQFLGTNGQRIPYIISVAGSVAVGKSTFARVLQALLSRWPEHRRVEHISTDGFLLPNQVLKERGLMGKKGFPESYDMHRLMKFVKDLKSGVPNVTAPVYSHLIYDVIPDGDKTVVQPDILILEGLNVLQSGMDYPHDPYHVFVSDFVDFSIYVDAPEDLLQTWYINRFLKLREGAFTDPDSYFHGYAKLTKEEAIKTAMTIWKEMNSVNLKQNILPTRERASLILTKSANHIVEEVRLRK

SEQ ID NO: 305 - DNA, 978 bp, Artificial Sequence
  Engineered variant of Pantothenate Kinase from Escherichia coli
atgcaccatcatcatcatcatggcggtagcggcagcatcaaagagcgcaccgagatgactccgtacctgcaactggaccgtaaccaatgggcggcggtgcgtgatagtaacccgatgaccctgagcgaggacgaaatcgcgcgtctgaagggtattaacgaagatctgagcctggaggaagtggcggaagtctacctgccgctgagccgtgttctgaacttctatattagcagcaacctgcgtcgtcaggcgcagctggaacagtttctgggtaccgggggccagcgtatcccgtatatcattagcgttgcgggtagcgtggcggttggcaaaagcacctttgcgcgtgtgctgcaggttctgctgagccgttggccggagcatcgtcgtgttgaacatatcagcaccgacggcttcctgctgccgaaccaagtgctgaaggagcgtggtctgatggggaaaaagggtttcccggaaagctacgatatgcaccgtctgatgaaatttgttaaagacctgaagagcggtgtgccgaatgttaccgcgccggtgtacagccacctgatctatgatgttattccggacggcgataaaaccgtggttcagccggacatcctgattctggagggtctgaacgtgctgcaaagcggcatggactattgtcacgatccgcaccacgtgtttgttagcgacttcgtggattttagcatctacgttgacgcgccggaggatctgctgcagacctggtacattaaccgtttcctgaaactgcgtgagggtgcgttcacggacccggatagctactttcacgggtatgcgaaactgaccaaggaagaggcgatcaagaccgcgatgaccatttggaaggagatgaacagcgtgaacctgaagcaaaacattctgccgacccgtgaacgtgcgatgctgattttgaccaaaagtgcaaaccacatcgtggaggaagttcgtctgcgtaag

SEQ ID NO: 306 - protein, 326 aa, Artificial Sequence
  Engineered variant of Pantothenate Kinase from Escherichia coli
MHHHHHHGGSGSIKERTEMTPYLQLDRNQWAAVRDSNPMTLSEDEIARLKGINEDLSLEEVAEVYLPLSRVLNFYISSNLRRQAQLEQFLGTGGQRIPYIISVAGSVAVGKSTFARVLQVLLSRWPEHRRVEHISTDGFLLPNQVLKERGLMGKKGFPESYDMHRLMKFVKDLKSGVPNVTAPVYSHLIYDVIPDGDKTVVQPDILILEGLNVLQSGMDYCHDPHHVFVSDFVDFSIYVDAPEDLLQTWYINRFLKLREGAFTDPDSYFHGYAKLTKEEAIKTAMTIWKEMNSVNLKQNILPTRERAMLILTKSANHIVEEVRLRK

SEQ ID NO: 307 - DNA, 978 bp, Artificial Sequence
  Engineered variant of Pantothenate Kinase from Escherichia coli
atgcaccatcatcatcatcatggcggtagcggcagcatcaaagagcaggttgagatgaccccgtacctgcaactggaccgtaaccaatgggcggcggtgcgtgatagtaacccgatgaccctgagcgaggacgaaatcgcgcgtctgaagggtattaacgaagatctgagcctggaggaagtggcggaagtctacctgccgctgagccgtgttctgaacttctatattagcagcagtctgcgtcgtcaggcgcagctggaacagtttctgggtaccaatggccagcgtatcccgtatatcattagcgttgcgggtagcgtggcggttggcaaaagcacctttgcgcgtgtgctgcaggcgctgctgagccgttggccagagagcagctacgttgaacatatcagcaccgacggcttcctgctgccgaaccaagtgctgaaggagcgtggtctgatggggaaaaagggtttcccggaaagctacgatatgcatcgtctgatgaaatttgttaaagacctgaagagcggtgtgccgaacgttaccgcgccggtgtacagccacctgatctatgatgttattccggacggcgataaaaccgtggttcagccggacatcctgattctggagggtctgaacgtgctgcaaagcggcatggactatccgcacgatccgcaccacgtgtttgttagcgacttcgtggattttagcatctacgttgacgcgccggaggatctgctgcagacctggtacattaaccgtttcctgaaactgcgtgagggtgcgttcaccgacccggatagctactttcacgggtatgcgaaactgaccaaggaagaggcgatcaaaaccgcgatgaccatttggaaggagatgaacagcgtgaacctgaagcaaaacattctgccgacccgtgaacgtgcgagcctgattctgaccaaaagtgcaaaccacatcgtggaggaagttcgtctgcgtaag

SEQ ID NO: 308 - protein, 326 aa, Artificial Sequence
  Engineered variant of Pantothenate Kinase from Escherichia coli
MHHHHHHGGSGSIKEQVEMTPYLQLDRNQWAAVRDSNPMTLSEDEIARLKGINEDLSLEEVAEVYLPLSRVLNFYISSSLRRQAQLEQFLGTNGQRIPYIISVAGSVAVGKSTFARVLQALLSRWPESSYVEHISTDGFLLPNQVLKERGLMGKKGFPESYDMHRLMKFVKDLKSGVPNVTAPVYSHLIYDVIPDGDKTVVQPDILILEGLNVLQSGMDYPHDPHHVFVSDFVDFSIYVDAPEDLLQTWYINRFLKLREGAFTDPDSYFHGYAKLTKEEAIKTAMTIWKEMNSVNLKQNILPTRERASLILTKSANHIVEEVRLRK

SEQ ID NO: 309 - DNA, 978 bp, Artificial Sequence
  Engineered variant of Pantothenate Kinase from Escherichia coli
atgcaccatcatcatcatcatggcggtagcggcagcatcaaagagcagaccgagatgaccccgtacctgcaactggaccgtaaccaatgggcggcggtgcgtgatagtaacccgatgaccctgagcgaggacgaaatcgcgcgtctgaagggtattaacgaagatctgagcctggaggaagtggcggaagtctacctgccgctgagccgtgttctgaacttctatattagcagcaacctgcgtcgtcaggcgcagctggaacagtttctgggtaccaatggccagcgtatcccgtatatcattagcgttgcgggtagcgtggcggttggcaaaagcacctttgcgcgtgtgctgcaggcgctgctgagccgttggccagagagcggctacgttgaacatatcagcaccgacggcttcctgctgccgaaccaagtgctgaaggagcgtggtctgatggggaaaaagggtttcccggaaagctacgatatgcaccgtctgatgaaatttgttaaagacctgaagagcggtgtgccgaacgttaccgcgccggtgtacagccacctgatctatgatgttattccggacggcgataaaaccgtggttcagccggacatcctgattctggagggtctgaacgtgctgcaaagcggcatggactatccgcacgatccgcaccacgtgtttgttagcgacttcgtggattttagcatctacgttgacgcgccggaggatctgctgcagacctggtacattaaccgtttcctgaaactgcgtgagggtgcgttcaccgacccggatagctactttcacgggtatgcgaaactgaccaaggaagaggcgatcaaaaccgcgatgaccatttggaaggagatgaacagcgtgaacctgaagcaaaacattctgccgacccgtgaacgtgcgagcctgattttgaccaaaagtgcaaaccacatcgtggaggaagttcgtctgcgtaag

SEQ ID NO: 310 - protein, 326 aa, Artificial Sequence
  Engineered variant of Pantothenate Kinase from Escherichia coli
MHHHHHHGGSGSIKEQTEMTPYLQLDRNQWAAVRDSNPMTLSEDEIARLKGINEDLSLEEVAEVYLPLSRVLNFYISSNLRRQAQLEQFLGTNGQRIPYIISVAGSVAVGKSTFARVLQALLSRWPESGYVEHISTDGFLLPNQVLKERGLMGKKGFPESYDMHRLMKFVKDLKSGVPNVTAPVYSHLIYDVIPDGDKTVVQPDILILEGLNVLQSGMDYPHDPHHVFVSDFVDFSIYVDAPEDLLQTWYINRFLKLREGAFTDPDSYFHGYAKLTKEEAIKTAMTIWKEMNSVNLKQNILPTRERASLILTKSANHIVEEVRLRK

SEQ ID NO: 311 - DNA, 978 bp, Artificial Sequence
  Engineered variant of Pantothenate Kinase from Escherichia coli
atgcaccatcatcatcatcatggcggtagcggcagcatcaaagagcagaccgagatgaccccgtacctgcaactggatcgtaaccaatgggccgcggttcgtagtagtaacccgatgaccctgagcgaggacgaaatcgcgcgtctgaagggtattaacgaagatctgagcctggaggaagtggcggaagtctacctgccgctgagccgtgttctgaacttctatgttagcagcaacgagcgtcgtcaggcgcagctggaacagtttctgggtaccaatggtcagcgtatcccgtatatcattagcgttgcgggtagcgtggcggttggcaaaagcacctttgcgcgtgtgctgcaggcgctgctgagccgttggtcggagcatcgtcgtgttgaacatatcagcaccgacggcttcctgctgccgaaccaagtgctgaaggagcgtggtctgatggggaaaaagggtttcccggaaagctacgatatgcaccgtctgatgaaatttgttaaagacctgaagagcggtgtgccgaacgttaccgcgccggtgtacagccacctgatctatgatgttattccggacggcgataaaaccgtggttcagccggacatcctgattctggagggtctgaacgtgctgcaaagcggcatggactatccgcacgatccgcaccacgtgtttgttagcgacttcgtggattttagcatctacgttgacgcgccggaggatctgctgcagacctggtacattaaccgtttcctgaaactgcgtgagggtgcgttcaccgacccggatagctactttcacgggtatgcgaaactgaccaaggaagaggcgatcaaaaccgcgatgaccatttggaaggagatgaacagcgtgaacctgaagcaaaacattctgccgacccgtgaacgtgcgagcctgattttgaccaaaagtgcaaaccacatcgtggaggaagttcgtctgcgtaag

SEQ ID NO: 312 - protein, 326 aa, Artificial Sequence
  Engineered variant of Pantothenate Kinase from Escherichia coli
MHHHHHHGGSGSIKEQTEMTPYLQLDRNQWAAVRSSNPMTLSEDEIARLKGINEDLSLEEVAEVYLPLSRVLNFYVSSNERRQAQLEQFLGTNGQRIPYIISVAGSVAVGKSTFARVLQALLSRWSEHRRVEHISTDGFLLPNQVLKERGLMGKKGFPESYDMHRLMKFVKDLKSGVPNVTAPVYSHLIYDVIPDGDKTVVQPDILILEGLNVLQSGMDYPHDPHHVFVSDFVDFSIYVDAPEDLLQTWYINRFLKLREGAFTDPDSYFHGYAKLTKEEAIKTAMTIWKEMNSVNLKQNILPTRERASLILTKSANHIVEEVRLRK

SEQ ID NO: 313 - DNA, 978 bp, Artificial Sequence
  Engineered variant of Pantothenate Kinase from Escherichia coli
atgcaccatcatcatcatcatggcggtagcggcagcatcaaagagcagaccgagatgaccccgtacctgcaactggaccgtaaccaatgggcggcggtggccgatagtaacccgatgaccctgagcgaggacgaaatcgcgcgtctgaagggtattaacgaagatctgagcctggaggaagtggcggaagtctacctgccgctgagccgtgttctgaacttctatattagcagcagtctgcgtcgtcaggcgcagctggaacagtttctgggtaccaatggccagcgtatcccgtatatcattagcgttgcgggtagcgtggcggttggcaaaagcacctttgcgcgtgtgctgcaggcgctgctgagccgttggcaagagagccgctacgttgaacatatcagcaccgacggcttcctgctgccgaaccaagtgctgaaggagcgtggtctgatggggaaaaagggtttcccggaaagctacgatatgcaccgtctgatgaaatttgttaaagacctgaagagcggtgtgccgaacgttaccgcgccggtgtacagccacctgatctatgatgttattccggacggcgataaaaccgtggttcagccggacatcctgattctggagggtctgaacgtgctgcaaagcggcatggactatccgcacgatccgcaccacgtgtttgttagcgacttcgtggattttagcatctacgttgacgcgccggaggatctgctgcagacctggtacattaaccgtttcctgaaactgcgtgagggtgcgttcaccgacccggatagctactttcacgggtatgcgaaactgaccaaggaagaggcgatcaaaaccgcgatgaccatttggaaggagatgaacagcgtgaacctgaagcaaaacattctgccgacccgtgaacgtgcgagcctgattctgaccaaaagtgcaaaccacatcgtggaggaagttcgtctgcgtaag

SEQ ID NO: 314 - protein, 326 aa, Artificial Sequence
  Engineered variant of Pantothenate Kinase from Escherichia coli
MHHHHHHGGSGSIKEQTEMTPYLQLDRNQWAAVADSNPMTLSEDEIARLKGINEDLSLEEVAEVYLPLSRVLNFYISSSLRRQAQLEQFLGTNGQRIPYIISVAGSVAVGKSTFARVLQALLSRWQESRYVEHISTDGFLLPNQVLKERGLMGKKGFPESYDMHRLMKFVKDLKSGVPNVTAPVYSHLIYDVIPDGDKTVVQPDILILEGLNVLQSGMDYPHDPHHVFVSDFVDFSIYVDAPEDLLQTWYINRFLKLREGAFTDPDSYFHGYAKLTKEEAIKTAMTIWKEMNSVNLKQNILPTRERASLILTKSANHIVEEVRLRK

SEQ ID NO: 315 - DNA, 978 bp, Artificial Sequence
  Engineered variant of Pantothenate Kinase from Escherichia coli
atgcaccatcatcatcatcatggcggtagcggcagcatcaaagagcagaccgagatgaccccgtacctgcaactggaccgtaaccaatgggcggcggtgcgtgatagtaacccgatgaccctgagcgaggacgaaaaagcgcgtctgaagggtattaacgaagatctgagcctggaggaagtggcggaagtctacctgccgctgagccgtgttctgaacttctatattagcagcagtctgcgtcgtcaggcgcagctggaacagtttctgggtaccaatggccagcgtatcccgtatatcattagcgttgcgggtagcgtggcggttggcaaaagcacctttgcgcgtgtgctgcaggcgctgctgagccgttggccggagcatcgtcgtgttgaacatatcagcaccgacggcttcctgctgccgaaccaagtgctgaaggagcgtggtctgatggggaaaaagggtttcccggaaagctacgatatgcatcgtctgatgaaatttgttaaagacctgaagagcggtgtgccgaacgttaccgcgccggtgtacagccacctgatctatgatgttattccggacggcgataaaaccgtggttcagccggacatcctgattctggagggtctgaacgtgctgcaaagcggcatggactatccgcacgatccgcaccacgtgtttgttagcgacttcgtggattttagcatctacgttgacgcgccggaggatctgctgcagacctggtacattaaccgtttcctgaaactgcgtgagggtgcgttcaccgacccggatagctactttcacgggtatgcgaaactgaccaaggaagaggcgatcaaaaccgcgatgaccatttggaaggagatgaacagcgtgaacctgaagcaaaacattctgccgacccgtgaacgtgcgagcctgattttgaccaaaagtgcaaaccacatcgtggaggaagttcgtctgcgtaag

SEQ ID NO: 316 - protein, 326 aa, Artificial Sequence
  Engineered variant of Pantothenate Kinase from Escherichia coli
MHHHHHHGGSGSIKEQTEMTPYLQLDRNQWAAVRDSNPMTLSEDEKARLKGINEDLSLEEVAEVYLPLSRVLNFYISSSLRRQAQLEQFLGTNGQRIPYIISVAGSVAVGKSTFARVLQALLSRWPEHRRVEHISTDGFLLPNQVLKERGLMGKKGFPESYDMHRLMKFVKDLKSGVPNVTAPVYSHLIYDVIPDGDKTVVQPDILILEGLNVLQSGMDYPHDPHHVFVSDFVDFSIYVDAPEDLLQTWYINRFLKLREGAFTDPDSYFHGYAKLTKEEAIKTAMTIWKEMNSVNLKQNILPTRERASLILTKSANHIVEEVRLRK

SEQ ID NO: 317 - DNA, 978 bp, Artificial Sequence
  Engineered variant of Pantothenate Kinase from Escherichia coli
atgcaccatcatcatcatcatggcggtagcggcagcatcaaagagcaggttgagatgaccccgtacctgcaactggaccgtaaccaatgggcggcggtgcgtgatagtaacccgatgaccctgagcgaggacgaaatcgcgcgtctgaagggtattaacgaagatctgagcctggaggaagtggcggaagtctacctgccgctgagccgtgttctgaacttctatattagcagcaacctgcgtcgtcaggcgcagctggaacagtttctgggtaccaatggccagcgtatcccgtatatcattagcgttgcgggtagcgtggcggttggcaaaagcacctttgcgcgtgtgctgcaggcgctgctgagccgttgggtagagcatcgccgcgttgaacatatcagcaccgacggcttcctgctgccgaaccaagtgctgaaggagcgtggtctgatggggaaaaagggtttcccggaaagctacgatatgcatcgtctgatgaaatttgttaaagacctgaagagcggtgtgccgaacgttaccgcgccggtgtacagccacctgatctatgatgttattccggacggcgataaaaccgtggttcagccggacatcctgattctggagggtctgaacgtgctgcaaagcggcatggactatccgcacgatccgcaccacgtgtttgttagcgacttcgtggattttagcatctacgttgacgcgccggaggatctgctgcagacctggtacattaaccgtttcctgaaactgcgtgagggtgcgttcaccgacccggatagctactttcacgggtatgcgaaactgaccaaggaagaggcgatcaaaaccgcgatgaccatttggaaggagatgaacagcgtgaacctgaagcaaaacattctgccgacccgtgaacgtgcgagcctgattttgaccaaaagtgcaaaccacatcgtggaggaagttcgtctgcgtaag

SEQ ID NO: 318 - protein, 326 aa, Artificial Sequence
  Engineered variant of Pantothenate Kinase from Escherichia coli
MHHHHHHGGSGSIKEQVEMTPYLQLDRNQWAAVRDSNPMTLSEDEIARLKGINEDLSLEEVAEVYLPLSRVLNFYISSNLRRQAQLEQFLGTNGQRIPYIISVAGSVAVGKSTFARVLQALLSRWVEHRRVEHISTDGFLLPNQVLKERGLMGKKGFPESYDMHRLMKFVKDLKSGVPNVTAPVYSHLIYDVIPDGDKTVVQPDILILEGLNVLQSGMDYPHDPHHVFVSDFVDFSIYVDAPEDLLQTWYINRFLKLREGAFTDPDSYFHGYAKLTKEEAIKTAMTIWKEMNSVNLKQNILPTRERASLILTKSANHIVEEVRLRK

SEQ ID NO: 319 - DNA, 978 bp, Artificial Sequence
  Engineered variant of Pantothenate Kinase from Escherichia coli
atgcaccatcatcatcatcatggcggtagcggcagcatcaaagagcagaccgagatgaccccgtacctgcaactggatcgtaaccaatgggccgcgattcgtagtagtaacccgatgaccctgagcgaggacgaaatcgcgcgtctgaagggtattaacgaagatctgagcctggaggaagtggcggaagtctacctgccgctgagccgtgttctgaacttctatattagcagcaacctgcgtcgtcaggcgcagctggaacagtttctgggtaccaatggccagcgtatcccgtatatcattagcgttgcgggtagcgtggcggttggcaaaagcacctttgcgcgtgtgctgcaggcgctgctgagccgttggtcggagcatcgtcgtgttgaacatatcagcaccgacggcttcctgctgccgaaccaagtgctgaaggagcgtggtctgatggggaaaaagggtttcccggaaagctacgatatgcaccgtctgatgaaatttgttaaagacctgaagagcggtgtgccgaacgttaccgcgccggtgtacagccacctgatctatgatgttattccggacggcgataaaaccgtggttcagccggacatcctgattctggagggtctgaacgtgctgcaaagcggcatggactatcctggggatccgcaccacacttttgttagcgacttcgtggattttagcatctacgttgacgcgccggaggatctgctgcagacctggtacattaaccgtttcctgaaactgcgtgagggtgcgttcaccgacccggatagctactttcacgggtatgcgaaactgaccaaggaagaggcgatcaaaaccgcgatgaccatttggaaggagatgaacagcgtgaacctgaagcaaaacattctgccgacccgtgaacgtgcgagcctgattctgaccaaaagtgcaaaccacatcgtggaggaagttcgtctgcgtaag

SEQ ID NO: 320 - protein, 326 aa, Artificial Sequence
  Engineered variant of Pantothenate Kinase from Escherichia coli
MHHHHHHGGSGSIKEQTEMTPYLQLDRNQWAAIRSSNPMTLSEDEIARLKGINEDLSLEEVAEVYLPLSRVLNFYISSNLRRQAQLEQFLGTNGQRIPYIISVAGSVAVGKSTFARVLQALLSRWSEHRRVEHISTDGFLLPNQVLKERGLMGKKGFPESYDMHRLMKFVKDLKSGVPNVTAPVYSHLIYDVIPDGDKTVVQPDILILEGLNVLQSGMDYPGDPHHTFVSDFVDFSIYVDAPEDLLQTWYINRFLKLREGAFTDPDSYFHGYAKLTKEEAIKTAMTIWKEMNSVNLKQNILPTRERASLILTKSANHIVEEVRLRK

SEQ ID NO: 321 - DNA, 978 bp, Artificial Sequence
  Engineered variant of Pantothenate Kinase from Escherichia coli
atgcaccatcatcatcatcatggcggtagcggcagcatcaaagagcagaccgagatgaccccgtacctgcaactggatcgtaaccaatgggccgcggttcgtagtagtaacccgatgaccctgagcgaggacgaaatcgcgcgtctgaagggtattaacgaagatctgagcctggaggaagtggcggaagtctacctgccgctgagccgtgttctgaacttctatattagcagcaacctgcgtcgtcaggcgcagctggaacagtttctgggtaccaatagtcagcgtatcccgtatatcattagcgttgcgggtagcgtggcggttggcaaaagcacctttgcgcgtgtgctgcagacgctgctgagccgttggtcggagcatcgtcgtgttgaacatatcagcaccgacggcttcctgctgccgaaccaagtgctgaaggagcgtggtctgatggggaaaaagggtttcccggaaagctacgatatgcaccgtctgatgaaatttgttaaagacctgaagagcggtgtgccgaacgttaccgcgccggtgtacagccacctgatctatgatgttattccggacggcgataaaaccgtggttcagccggacatcctgattctggagggtctgaacgtgctgcaaagcggcatggactatccgcacgatccgcaccacgtgtttgttagcgacttcgtggattttagcatctacgttgacgcgccggaggatctgctgcagacctggtacattaaccgtttcctgaaactgcgtgagggtgcgttcaccgacccggatagctactttcacgggtatgcgaaactgaccaaggaagaggcgatcaaaaccgcgatgaccatttggaaggagatgaacctggtgaacctgaagcaaaacattctgccgacccgtgaacgtgcgagcctgattttgaccaaaagtgcaaaccacatcgtggaggaagttcgtctgcgtaag

SEQ ID NO: 322 - protein, 326 aa, Artificial Sequence
  Engineered variant of Pantothenate Kinase from Escherichia coli
MHHHHHHGGSGSIKEQTEMTPYLQLDRNQWAAVRSSNPMTLSEDEIARLKGINEDLSLEEVAEVYLPLSRVLNFYISSNLRRQAQLEQFLGTNSQRIPYIISVAGSVAVGKSTFARVLQTLLSRWSEHRRVEHISTDGFLLPNQVLKERGLMGKKGFPESYDMHRLMKFVKDLKSGVPNVTAPVYSHLIYDVIPDGDKTVVQPDILILEGLNVLQSGMDYPHDPHHVFVSDFVDFSIYVDAPEDLLQTWYINRFLKLREGAFTDPDSYFHGYAKLTKEEAIKTAMTIWKEMNLVNLKQNILPTRERASLILTKSANHIVEEVRLRK

SEQ ID NO: 323 - DNA, 978 bp, Artificial Sequence
  Engineered variant of Pantothenate Kinase from Escherichia coli
atgcaccatcatcatcatcatggcggtagcggcagcatcaaagagcaggtcgagatgaccccgtacctgcaactggaccgtaaccaatgggcggcggtgcgtgatagtaacccgatgaccctgagcgaggacgaaatcgcgcgtctgaagggtattaacgaagatctgagcctggaggaagtggcgctggtctacctgccgctgagccgtgttctgaacttctatattagcagcaatctgcgtcgtcaggcgcagctggaacagtttctgggtaccaatggccagcgtatcccgtatatcattagcgttgcgggtagcgtggcggttggcaaaagcacctttgcgcgtgtgctgcaggcgctgctgagccgttggccggagcatcgtcgtgttgaacatatcagcaccgacggcttcctgctgccgaaccaagtgctgaaggagcgtggtctgatggggaaaaagggtttcccggaaagctacgatatgcaccgtctgatgaaatttgttaaagacctgaagagcggtgtgccgaacgttaccgcgccggtgtacagccacctgatctatgatgttatcccggacggcgataaaaccgtggttcagccggacatcctgattctggagggtctgaacgtgctgcaaagcggcatggactatccgcacgatccgcaccacgtgtttgttagcgacttcgtggattttagcatctacgttgacgcgccggaggatctgctgcagacctggtacattaaccgtttcctgaaactgcgtgagggtgcgttcaccgacccggatagctactttcacgggtatgcgaaactgaccaaggaagaggcgatcaaaaccgcgatgaccatttggaaggagatgaacagcgtgaacctgaagcaaaacattctgccgacccgtgaacgtgcgagcctgattttgaccaaaagtgcaaaccacatcgtggaggaagttcgtctgcgtaag

SEQ ID NO: 324 - protein, 326 aa, Artificial Sequence
  Engineered variant of Pantothenate Kinase from Escherichia coli
MHHHHHHGGSGSIKEQVEMTPYLQLDRNQWAAVRDSNPMTLSEDEIARLKGINEDLSLEEVALVYLPLSRVLNFYISSNLRRQAQLEQFLGTNGQRIPYIISVAGSVAVGKSTFARVLQALLSRWPEHRRVEHISTDGFLLPNQVLKERGLMGKKGFPESYDMHRLMKFVKDLKSGVPNVTAPVYSHLIYDVIPDGDKTVVQPDILILEGLNVLQSGMDYPHDPHHVFVSDFVDFSIYVDAPEDLLQTWYINRFLKLREGAFTDPDSYFHGYAKLTKEEAIKTAMTIWKEMNSVNLKQNILPTRERASLILTKSANHIVEEVRLRK

SEQ ID NO: 325 - DNA, 978 bp, Artificial Sequence
  Engineered variant of Pantothenate Kinase from Escherichia coli
atgcaccatcatcatcatcatggcggtagcggcagcatcaaagagcagaccgagatgaccccgtacctgcaactggaccgtaaccaatgggcggcggtgcgtgatagtaacccgatgaccctgagcgaggacgaaatcgcgcgtctgaagggtattaacgaagatctgagcctggaggaagtggcgctggtctacctgccgctgagccgtgttctgaacttctatattagcagcaacctgcgtcgtcaggcgcagctggaacagtttctgggtaccaatggccagcgtatcccgtatatcattagcgttgcgggtagcgtggcggttggcaaaagcacctttgcgcgtgtgctgcaggcgctgctgagccgttggccggagcatcgtcgtgttgaacatatcagcaccgacggcttcctgctgccgaaccaagtgctgaaggagcgtggtctgatggggaaaaagggtttcccggaaagctacgatatgcctcgtctgatgaaatttgttaaagacctgaagagcggtgtgccgaacgttaccgcgccggtgtacagccacctgatctatgatgttattccggacggcgataaaaccgtggttcagccggacatcctgattctggagggtctgaacgtgctgcaaagcggcatggactatccgcacgatccgcaccacgtgtttgttagcgacttcgtggattttagcatctacgttgacgcgccggaggatctgctgcagacctggtacattaaccgtttcctgaaactgcgtgagggtgcgttcaccgacccggatagctactttcacgggtatgcgaaactgaccaaggaagaggcgatcaaaaccgcgatgaccatttggaaggagatgaacagcgtgaacctgaagcaaaacattctgccgacccgtgaacgtgcgagcctgattttgaccaaaagtgcaaaccacatcgtggaggaagttcgtctgcgtaag

SEQ ID NO: 326 - protein, 326 aa, Artificial Sequence
  Engineered variant of Pantothenate Kinase from Escherichia coli
MHHHHHHGGSGSIKEQTEMTPYLQLDRNQWAAVRDSNPMTLSEDEIARLKGINEDLSLEEVALVYLPLSRVLNFYISSNLRRQAQLEQFLGTNGQRIPYIISVAGSVAVGKSTFARVLQALLSRWPEHRRVEHISTDGFLLPNQVLKERGLMGKKGFPESYDMPRLMKFVKDLKSGVPNVTAPVYSHLIYDVIPDGDKTVVQPDILILEGLNVLQSGMDYPHDPHHVFVSDFVDFSIYVDAPEDLLQTWYINRFLKLREGAFTDPDSYFHGYAKLTKEEAIKTAMTIWKEMNSVNLKQNILPTRERASLILTKSANHIVEEVRLRK

SEQ ID NO: 327 - DNA, 978 bp, Artificial Sequence
  Engineered variant of Pantothenate Kinase from Escherichia coli
atgcaccatcatcatcatcatggcggtagcggcagcatcaaagagcagaccgagatgaccccgtacctgcaactggaccgtaaccaatgggcggcggtgcgtgatagtaacccgatgaccctgagcgaggacgaaatcgcgcgtctgaagggtattaacgaagatctgagcctggaggaagtggcggaagtctacctgccgctgagccgtgttctgaacttctatattagcagcagtctgcgtcgtcaggcgcagctggaacagtttctgggtaccaatggccagcgtatcccgtatatcattagcgttgcgggtagcgtggcggttggcaaaagcacctttgcgcgtgtgctgcaggcgctgctgagccgttgggtagagcatcgccgcgttgaacatatcagcaccgacggcttcctgctgccgaaccaagtgctgaaggagcgtggtctgatggggaaaaagggtttcccggaaagctacgatatgcctcgtctgatgaaatttgttaaagacctgaagagcggtgtgccgaacgttaccgcgccggtgtacagccacctgatctatgatgttatcccggacggcgataaaaccgtggttcagccggacatcctgattctggagggtctgaacgtgctgcaaagcggcatggactatccgcacgatccgcaccacgtgtttgttagcgacttcgtggattttagcatctacgttgacgcgccggaggatctgctgcagacctggtacattaaccgtttcctgaaactgcgtgagggtgcgttcaccgacccggatagctactttcacgggtatgcgaaactgaccaaggaagaggcgatcaaaaccgcgatgaccatttggaaggagatgaacagcgtgaacctgaagcaaaacattctgccgacccgtgaacgtgcgagcctgattttgaccaaaagtgcaaaccacatcgtggaggaagttcgtctgcgtaag

SEQ ID NO: 328 - protein, 326 aa, Artificial Sequence
  Engineered variant of Pantothenate Kinase from Escherichia coli
MHHHHHHGGSGSIKEQTEMTPYLQLDRNQWAAVRDSNPMTLSEDEIARLKGINEDLSLEEVAEVYLPLSRVLNFYISSSLRRQAQLEQFLGTNGQRIPYIISVAGSVAVGKSTFARVLQALLSRWVEHRRVEHISTDGFLLPNQVLKERGLMGKKGFPESYDMPRLMKFVKDLKSGVPNVTAPVYSHLIYDVIPDGDKTVVQPDILILEGLNVLQSGMDYPHDPHHVFVSDFVDFSIYVDAPEDLLQTWYINRFLKLREGAFTDPDSYFHGYAKLTKEEAIKTAMTIWKEMNSVNLKQNILPTRERASLILTKSANHIVEEVRLRK

SEQ ID NO: 329 - DNA, 978 bp, Artificial Sequence
  Engineered variant of Pantothenate Kinase from Escherichia coli
atgcaccatcatcatcatcatggcggtagcggcagcatcaaagagcagaccgagatgaccccgtacctgcaactgacgcgtaaccaatgggccgcgattcgtgacagtaacccgatgaccctgagcgaggacgaaatcgcgcgtctgaagggtattaacgaagatctgagcctggaggaagtggcggaagtctacctgccgctgagccgtgttctgaacttctatattagcagcaacgagcgtcgtcaggcgcagctggaacagtttctgggtaccaatggccagcgtatcccgtatatcattagcgttgcgggtagcgtggcggttggcaaaagcacctttgcgcgtgtgctgcaggcgctgctgagccgttggtcggagcatcgtcgtgttgaacatatcagcaccgacggcttcctgctgccgaaccaagtgctgaaggagcgtggtctgatggggaaaaagggtttcccggaaagctacgatatgcaccgtctgatgaaatttgttaaagacctgaagagcggtgtgccgaacgttaccgcgccggtgtacagccacctgatctatgatgttattccggacggcgataaaaccgtggttcagccggacatcctgattctggagggtctgaacgtgctgcaaagcggcatggactatccgcacgatccgcaccacgtgtttgttagcgacttcgtggattttagcatctacgttgacgcgccggaggatctgctgcagacctggtacattaaccgtttcctgaaactgcgtgagggtgcgttcaccgacccggatagctactttcacgggtatgcgaaactgaccaaggaagaggcgatcaaaaccgcgatgaccatttggaaggagggtaacctggtgaacctgaagcaaaacattctgccgacccgtgaacgtgcgagcctgattttgaccaaaagtgcaaaccacatcgtggaggaagttcgtctgcgtaag

SEQ ID NO: 330 - protein, 326 aa, Artificial Sequence
  Engineered variant of Pantothenate Kinase from Escherichia coli
MHHHHHHGGSGSIKEQTEMTPYLQLTRNQWAAIRDSNPMTLSEDEIARLKGINEDLSLEEVAEVYLPLSRVLNFYISSNERRQAQLEQFLGTNGQRIPYIISVAGSVAVGKSTFARVLQALLSRWSEHRRVEHISTDGFLLPNQVLKERGLMGKKGFPESYDMHRLMKFVKDLKSGVPNVTAPVYSHLIYDVIPDGDKTVVQPDILILEGLNVLQSGMDYPHDPHHVFVSDFVDFSIYVDAPEDLLQTWYINRFLKLREGAFTDPDSYFHGYAKLTKEEAIKTAMTIWKEGNLVNLKQNILPTRERASLILTKSANHIVEEVRLRK

SEQ ID NO: 331 - DNA, 978 bp, Artificial Sequence
  Engineered variant of Pantothenate Kinase from Escherichia coli
atgcaccatcatcatcatcatggcggtagcggcagcatcaaagagcagaccgagatgaccccgtacctgcaactggaccgtaaccaatgggcggcggtggccgatagtaacccgatgaccctgagcgaggacgaaatcgcgcgtctgaagggtattaacgaagatctgagcctggaggaagtggcggaagtctacctgccgctgagccgtgttctgaacttctatattagcagcaatctgcgtcgtcaggcgcagctggaacagtttctgggtaccaatggccagcgtatcccgtatatcattagcgttgcgggtagcgtggcggttggcaaaagcacctttgcgcgtgtgctgcaggcgctgctgagccgttggccggagcatcgtcgtgttgaacatatcagcaccgacggcttcctgctgccgaaccaagtgctgaaggagcgtggtctgatggggaaaaagggtttcccggaaagctacgatatgcctcgtctgatgaaatttgttaaagacctgaagagcggtgtgccgaacgttaccgcgccggtgtacagccacctgatctatgatgttattccggacggcgataaaaccgtggttcagccggacatcctgattctggagggtctgaacgtgctgcaaagcggcatggactatccgcacgatccgcaccacgtgtttgttagcgacttcgtggattttagcatctacgttgacgcgccggaggatctgctgcagacctggtacattaaccgtttcctgaaactgcgtgagggtgcgttcaccgacccggatagctactttcacgggtatgcgaaactgaccaaggaagaggcgatcaaaaccgcgatgaccatttggaaggagatgaacagcgtgaacctgaagcaaaacattctgccgacccgtgaacgtgcgagcctgattttgaccaaaagtgcaaaccacatcgtggaggaagttcgtctgcgtaag

SEQ ID NO: 332 - protein, 326 aa, Artificial Sequence
  Engineered variant of Pantothenate Kinase from Escherichia coli
MHHHHHHGGSGSIKEQTEMTPYLQLDRNQWAAVADSNPMTLSEDEIARLKGINEDLSLEEVAEVYLPLSRVLNFYISSNLRRQAQLEQFLGTNGQRIPYIISVAGSVAVGKSTFARVLQALLSRWPEHRRVEHISTDGFLLPNQVLKERGLMGKKGFPESYDMPRLMKFVKDLKSGVPNVTAPVYSHLIYDVIPDGDKTVVQPDILILEGLNVLQSGMDYPHDPHHVFVSDFVDFSIYVDAPEDLLQTWYINRFLKLREGAFTDPDSYFHGYAKLTKEEAIKTAMTIWKEMNSVNLKQNILPTRERASLILTKSANHIVEEVRLRK

SEQ ID NO: 333 - DNA, 978 bp, Artificial Sequence
  Engineered variant of Pantothenate Kinase from Escherichia coli
atgcaccatcatcatcatcatggcggtagcggcagcatcaaagagcagaccgagctgaccccgtacctgcaactggaccgtaaccaatgggcggcggtgcgtgatagtaacccgatgaccctgagcgaggacgaaatcgcgcgtctgaagggtattaacgaagatctgagcctggaggaagtggcggaagtctacctgccgctgagccgtgttctgaacttctatattctgagcaacctgcgtcgtcaggcgcagctggaacagtttctgggtaccaatggccagcgtatcccgtatatcattagcgttgcgggtagcgtggcggttggcaaaagcacctttgcgcgtgtgctgcaggcgctgctgagccgttggccggagcatcgtcgtgttgaacatatcagcaccgacggcttcctgcacccgaaccaagtgctgaaggagcgtggtctgatggggaaaaagggtttcccggaaagctacgatatgcaccgtctgatgaaatttgttaaagacctgaagagcggtgtgccgaacgttaccgcgccggtgtacagccacctgatctatgatgttattccggatggcgataaaaccgtggttcagccggacatcctgattctggagggtctgaacgtgctgcaaagcggctgcgactatccgcacgatccgtatcacgtgtttgttagcgacttcgtggattttagcatctacgttgacgcgccggaggatctgctgcagacctggtacattaaccgtttcctgaaactgcgtgagggtgcgttcaccgacccggatagctactttcacgggtatgcgaaactgaccaaggaagaggcgatcaaaaccgcgatgaccatttggaaggagatgaacagcgtgaacctgaagcaaaacattctgccgacccgtgaacgtgcgtcgctgattttgaccaaaagtgcaaaccacatcgtggaggaagttcgtctgcgtaag

SEQ ID NO: 334 - protein, 326 aa, Artificial Sequence
  Engineered variant of Pantothenate Kinase from Escherichia coli
MHHHHHHGGSGSIKEQTELTPYLQLDRNQWAAVRDSNPMTLSEDEIARLKGINEDLSLEEVAEVYLPLSRVLNFYILSNLRRQAQLEQFLGTNGQRIPYIISVAGSVAVGKSTFARVLQALLSRWPEHRRVEHISTDGFLHPNQVLKERGLMGKKGFPESYDMHRLMKFVKDLKSGVPNVTAPVYSHLIYDVIPDGDKTVVQPDILILEGLNVLQSGCDYPHDPYHVFVSDFVDFSIYVDAPEDLLQTWYINRFLKLREGAFTDPDSYFHGYAKLTKEEAIKTAMTIWKEMNSVNLKQNILPTRERASLILTKSANHIVEEVRLRK

SEQ ID NO: 335 - DNA, 978 bp, Artificial Sequence
  Engineered variant of Pantothenate Kinase from Escherichia coli
atgcaccatcatcatcatcatggcggtagcggcagcatcaaagagcagaccgagatgaccccgtacctgcaactggaccgtaaccaatgggccgcggttcgtgacagtaacccgatgaccctgagcgaggacgaaatcgcgcgtctgaagggtattaacgaagatctgagcctggaggaagtggcggaagtctacctgccgctgagccgtgttctgaacttctatattagcagcaacctgcgtcgtcaggcgcagctggaacagtttctgggtaccaatagtcagcgtatcccgtatatcattagcgttgcgggtagcgtggcggttggcaaaagcacctttgcgcgtgtgctgcaggcgctgctgagccgttggtcggagcatcgtcgtgttgaacatatcagcaccgacggcttcctgctgccgaaccaagtgctgaaggagcgtggtctgatggggaaaaagggtttcccggaaagctacgatatgcaccgtctgatgaaatttgttaaagacctgaagagcggtgtgccgaacgttaccgcgccggtgtacagccacctgatctatgatgttattccggacggcgataaaaccgtggttcagccggacatcctgattctggagggtctgaacgtgctgcaaagcggcatggactatccgcacgatccgcaccacgtgtttgttagcgacttcgtggattttagcatctacgttgacgcgccggaggatctgctgcagacctggtacattaaccgtttcctgaaactgcgtgagggtgcgttcaccgacccggatagctactttcacgggtatgcgaaactgaccaaggaagaggcgatcaaaaccgcgatgaccatttggaaggagatgaacctggtgaacctgaagcaaaacattctgccgacccgtgaacgtgcgagcctgattctgaccaaaagtgcaaaccacatcgtggaggaagttcgtctgcgtaag

SEQ ID NO: 336 - protein, 326 aa, Artificial Sequence
  Engineered variant of Pantothenate Kinase from Escherichia coli
MHHHHHHGGSGSIKEQTEMTPYLQLDRNQWAAVRDSNPMTLSEDEIARLKGINEDLSLEEVAEVYLPLSRVLNFYISSNLRRQAQLEQFLGTNSQRIPYIISVAGSVAVGKSTFARVLQALLSRWSEHRRVEHISTDGFLLPNQVLKERGLMGKKGFPESYDMHRLMKFVKDLKSGVPNVTAPVYSHLIYDVIPDGDKTVVQPDILILEGLNVLQSGMDYPHDPHHVFVSDFVDFSIYVDAPEDLLQTWYINRFLKLREGAFTDPDSYFHGYAKLTKEEAIKTAMTIWKEMNLVNLKQNILPTRERASLILTKSANHIVEEVRLRK

SEQ ID NO: 337 - DNA, 978 bp, Artificial Sequence
  Engineered variant of Pantothenate Kinase from Escherichia coli
atgcaccatcatcatcatcatggcggtagcggcagcatcaaagagcagaccgagatgaccccgtacctgcaactggaccgtaaccaatgggcggcggtgcgtgatagtaacccgatgaccctgagcgaggacgaaaaagcgcgtctgaagggtattaacgaagatctgagcctggaggaagtggcggaagtctacctgccgctgagccgtgttctgaacttctatattagcagcaacctgcgtcgtcaggcgcagctggaacagtttctgggtaccaatggccagcgtatcccgtatatcattagcgttgcgggtagcgtggcggttggcaaaagcacctttgcgcgtgtgctgcaggcgctgctgagccgttggccggagcatcgtcgtgttgaacatatcagcaccgacggcttcctgctgccgaaccaagtgctgaaggagcgtggtctgatggggaaaaagggtttcccggaaagctacgatatgcaccgtctgatgaaatttgttaaagacctgaagagcggtgtgccgaacgttaccgcgccggtgtacagccacctgatctatgatgttgtcccggacggcgataaaaccgtggttcagccggacatcctgattctggagggtctgaacgtgctgcaaagcggcatggactatccgcacgatccgcaccacgtgtttgttagcgacttcgtggattttagcatctacgttgacgcgccggaggatctgctgcagacctggtacattaaccgtttcctgaaactgcgtgagggtgcgttcaccgacccggatagctactttcacgggtatgcgaaactgaccaaggaagaggcgatcaaaaccgcgatgaccatttggaaggagatgaacagcgtgaacctgaagcaaaacattctgccgacccgtgaacgtgcgagcctgattttgaccaaaagtgcaaaccacatcgtggaggaagttcgtctgcgtaag

SEQ ID NO: 338 - protein, 326 aa, Artificial Sequence
  Engineered variant of Pantothenate Kinase from Escherichia coli
MHHHHHHGGSGSIKEQTEMTPYLQLDRNQWAAVRDSNPMTLSEDEKARLKGINEDLSLEEVAEVYLPLSRVLNFYISSNLRRQAQLEQFLGTNGQRIPYIISVAGSVAVGKSTFARVLQALLSRWPEHRRVEHISTDGFLLPNQVLKERGLMGKKGFPESYDMHRLMKFVKDLKSGVPNVTAPVYSHLIYDVVPDGDKTVVQPDILILEGLNVLQSGMDYPHDPHHVFVSDFVDFSIYVDAPEDLLQTWYINRFLKLREGAFTDPDSYFHGYAKLTKEEAIKTAMTIWKEMNSVNLKQNILPTRERASLILTKSANHIVEEVRLRK

SEQ ID NO: 339 - DNA, 978 bp, Artificial Sequence
  Engineered variant of Pantothenate Kinase from Escherichia coli
atgcaccatcatcatcatcatggcggtagcggcagcatcaaagagcagaccgagatgaccccgtacctgcaactggatcgtaaccaatgggccgcgattcgtgacagtaacccgatgaccctgagcgaggacgaaatcgcgcgtctgaagggtattaacgaagatctgagcctggaggaagtggcggaagtctacctgccgctgagccgtgttctgaacttctatattagcagcgccctgcgtcgtcaggcgcagctggaacagtttctgggtaccaatggccagcgtatcccgtatatcattagcgttgcgggtagcgtggcggttggcaaaagcacctttgcgcgtgtgctgcaggcgctgctgagccgttggtcggagcatcgtcgtgttgaacatatcagcaccgacggcttcctgctgccgaaccaagtgctgaaggagcgtggtctgatggggaaaaagggtttcccggaaagctacgatatgcaccgtctgatgaaatttgttaaagacctgaagagcggtgtgccgaacgttaccgcgccggtgtacagccacctgatctatgatgttattccggacggcgataaaaccgtggttcagccggacatcctgattctggagggtctgaacgtgctgcaaagcggcatggactatgagcatgatccgcaccacacttttgttagcgacttcgtggattttagcatctacgttgacgcgccggaggatctgctgcagacctggtacattaaccgtttcctgaaactgcgtgagggtgcgttcaccgacccggatagctactttcacgggtatgcgaaactgaccaaggaagaggcgatcaaaaccgcgatgaccatttggaaggagatgaacctggtgaacctgaagcaaaacattctgccgacccgtgaacgtgcgagcctgattttgaccaaaagtgcaaaccacatcgtggaggaagttcgtctgcgtaag

SEQ ID NO: 340 - protein, 326 aa, Artificial Sequence
  Engineered variant of Pantothenate Kinase from Escherichia coli
MHHHHHHGGSGSIKEQTEMTPYLQLDRNQWAAIRDSNPMTLSEDEIARLKGINEDLSLEEVAEVYLPLSRVLNFYISSALRRQAQLEQFLGTNGQRIPYIISVAGSVAVGKSTFARVLQALLSRWSEHRRVEHISTDGFLLPNQVLKERGLMGKKGFPESYDMHRLMKFVKDLKSGVPNVTAPVYSHLIYDVIPDGDKTVVQPDILILEGLNVLQSGMDYEHDPHHTFVSDFVDFSIYVDAPEDLLQTWYINRFLKLREGAFTDPDSYFHGYAKLTKEEAIKTAMTIWKEMNLVNLKQNILPTRERASLILTKSANHIVEEVRLRK

SEQ ID NO: 341 - DNA, 978 bp, Artificial Sequence
  Engineered variant of Pantothenate Kinase from Escherichia coli
atgcaccatcatcatcatcatggcggtagcggcagcatcaaagagcagaccgagatgaccccgtacctgcaactggaccgtaaccaatgggcggcggtgcgtgatagtaacccgatgaccctgagcgaggacgaaaaagcgcgtctgaagggtattaacgaagatctgagcctggaggaagtggcggaagtctacctgccgctgagccgtgttctgaacttctatattagcagcaacctgcgtcgtcaggcgcagctggaacagtttctgggtaccaatggccagcgtatcccgtatatcattagcgttgcgggtagcgtggcggttggcaaaagcacctttgcgcgtgtgctgcaggcgctgctgagccgttggccagagagcggccgcgttgaacatatcagcaccgacggcttcctgctgccgaaccaagtgctgaaggagcgtggtctgatggggaaaaagggtttcccggaaagctacgatatgcctcgtctgatgaaatttgttaaagacctgaagagcggtgtgccgaacgttaccgcgccggtgtacagccacctgatctatgatgttattccggacggcgataaaaccgtggttcagccggacatcctgattctggagggtctgaacgtgctgcaaagcggcatggactatccgcacgatccgcaccacgtgtttgttagcgacttcgtggattttagcatctacgttgacgcgccggaggatctgctgcagacctggtacattaaccgtttcctgaaactgcgtgagggtgcgttcaccgacccggatagctactttcacgggtatgcgaaactgaccaaggaagaggcgatcaaaaccgcgatgaccatttggaaggagatgaacagcgtgaacctgaagcaaaacattctgccgacccgtgaacgtgcgagcctgattttgaccaaaagtgcaaaccacatcgtggaggaagttcgtctgcgtaag

SEQ ID NO: 342 - protein, 326 aa, Artificial Sequence
  Engineered variant of Pantothenate Kinase from Escherichia coli
MHHHHHHGGSGSIKEQTEMTPYLQLDRNQWAAVRDSNPMTLSEDEKARLKGINEDLSLEEVAEVYLPLSRVLNFYISSNLRRQAQLEQFLGTNGQRIPYIISVAGSVAVGKSTFARVLQALLSRWPESGRVEHISTDGFLLPNQVLKERGLMGKKGFPESYDMPRLMKFVKDLKSGVPNVTAPVYSHLIYDVIPDGDKTVVQPDILILEGLNVLQSGMDYPHDPHHVFVSDFVDFSIYVDAPEDLLQTWYINRFLKLREGAFTDPDSYFHGYAKLTKEEAIKTAMTIWKEMNSVNLKQNILPTRERASLILTKSANHIVEEVRLRK

SEQ ID NO: 343 - DNA, 978 bp, Artificial Sequence
  Engineered variant of Pantothenate Kinase from Escherichia coli
atgcaccatcatcatcatcatggcggtagcggcagcatcaaagagcagaccgagatgaccccgtacctgcaactggatcgtaaccaatgggccgcgtttcgtagtagtaacccgatgaccctgagcgaggacgaaatcgcgcgtctgaagggtattaacgaagatctgagcctggaggaagtggcggaagtctacctgccgctgagccgtgttctgaacttctatattagcagcaacctgcgtcgtcaggcgcagctggaacagtttctgggtaccaatggccagcgtatcccgtatatcattagcgttgcgggtagcgtggcggttggcaaaagcacctttgcgcgtgtgctgcaggcgctgctgagccgttggtcggagcatcgtcgtgttgaacatatcagcaccgacggcttcctgctgccgaaccaagtgctgaaggagcgtggtctgatggggaaaaagggtttcccggaaagctacgatatgcaccgtctgatgaaatttgttaaagacctgaagagcggtgtgccgaacgttaccgcgccggtgtacagccacctgatctatgatgttattccggacggcgataaaaccgtggttcagccggacatcctgattctggagggtctgaacgtgctgcaaagcggcatggactatccgcacgatccgcaccacgtgtttgttagcgacttcgtggattttagcatctacgttgacgcgccggaggatctgctgcagacctggtacattaaccgtttcctgaaactgcgtgagggtgcgttcaccgacccggatagctactttcacgggtatgcgaaactgaccaaggaagaggcgatcaaaaccgcgatgaccatttggaaggagatgaacccggtgaacctgaagcaaaacattttgccgacccgtgaacgtgcgagcctgattttgaccaaaagtgcaaaccacatcgtggaggaagttcgtctgcgtaag

SEQ ID NO: 344 - protein, 326 aa, Artificial Sequence
  Engineered variant of Pantothenate Kinase from Escherichia coli
MHHHHHHGGSGSIKEQTEMTPYLQLDRNQWAAFRSSNPMTLSEDEIARLKGINEDLSLEEVAEVYLPLSRVLNFYISSNLRRQAQLEQFLGTNGQRIPYIISVAGSVAVGKSTFARVLQALLSRWSEHRRVEHISTDGFLLPNQVLKERGLMGKKGFPESYDMHRLMKFVKDLKSGVPNVTAPVYSHLIYDVIPDGDKTVVQPDILILEGLNVLQSGMDYPHDPHHVFVSDFVDFSIYVDAPEDLLQTWYINRFLKLREGAFTDPDSYFHGYAKLTKEEAIKTAMTIWKEMNPVNLKQNILPTRERASLILTKSANHIVEEVRLRK

SEQ ID NO: 345 - DNA, 978 bp, Artificial Sequence
  Engineered variant of Pantothenate Kinase from Escherichia coli
atgcaccatcatcatcatcatggcggtagcggcagcatcaaagagcagaccgagatgaccccgtacctgcaactggaccgtaaccaatgggcggcggtgcgtgatagtaacccgatgaccctgagcgaggacgaaatcgcgcgtctgaagggtattaacgaagatctgagcctggaggaagtggcggaagtctacctgccgctgagccgtgttctgaacttctatattagcagcaacctgcgtcgtcaggcgcagctggaacagtttctgggtaccaatggccagcgtatcccgtatatcattagcgttgcgggtagcgtggcggttggcaaaagcacctttgcgcgtgtgctgcaggcgctgctgagccgttgggtagagcatggccgcgttgaacatatcagcaccgacggcttcctgctgccgaaccaagtgctgaaggagcgtggtctgatggggaaaaagggtttcccggaaagctacgatatgcctcgtctgatgaaatttgttaaagacctgaagagcggtgtgccgaacgttaccgcgccggtgtacagccacctgatctatgatgttattccggacggcgataaaaccgtggttcagccggacatcctgattctggagggtctgaacgtgctgcaaagcggcatggactatccgcacgatccgcaccacgtgtttgttagcgacttcgtggattttagcatctacgttgacgcgccggaggatctgctgcagacctggtacattaaccgtttcctgaaactgcgtgagggtgcgttcaccgacccggatagctactttcacgggtatgcgaaactgaccaaggaagaggcgatcaaaaccgcgatgaccatttggaaggagatgaacagcgtgaacctgaagcaaaacattctgccgacccgtgaacgtgcgagcctgattctgaccaaaagtgcaaaccacatcgtggaggaagttcgtctgcgtaag

SEQ ID NO: 346 - protein, 326 aa, Artificial Sequence
  Engineered variant of Pantothenate Kinase from Escherichia coli
MHHHHHHGGSGSIKEQTEMTPYLQLDRNQWAAVRDSNPMTLSEDEIARLKGINEDLSLEEVAEVYLPLSRVLNFYISSNLRRQAQLEQFLGTNGQRIPYIISVAGSVAVGKSTFARVLQALLSRWVEHGRVEHISTDGFLLPNQVLKERGLMGKKGFPESYDMPRLMKFVKDLKSGVPNVTAPVYSHLIYDVIPDGDKTVVQPDILILEGLNVLQSGMDYPHDPHHVFVSDFVDFSIYVDAPEDLLQTWYINRFLKLREGAFTDPDSYFHGYAKLTKEEAIKTAMTIWKEMNSVNLKQNILPTRERASLILTKSANHIVEEVRLRK

SEQ ID NO: 347 - DNA, 978 bp, Artificial Sequence
  Engineered variant of Pantothenate Kinase from Escherichia coli
atgcaccatcatcatcatcatggcggtagcggcagcatcaaagagcaggttgagatgaccccgtacctgcaactggaccgtaaccaatgggcggcggtgcgtgatagtaacccgatgaccctgagcgaggacgaaatcgcgcgtctgaagggtattaacgaagatctgagcctggaggaagtggcgctggtctacctgccgctgagccgtgttctgaacttctatattagcagcagtctgcgtcgtcaggcgcagctggaacagtttctgggtaccaatggccagcgtatcccgtatatcattagcgttgcgggtagcgtggcggttggcaaaagcacctttgcgcgtgtgctgcaggcgctgctgagccgttggccggagcatcgtcgtgttgaacatatcagcaccgacggcttcctgctgccgaaccaagtgctgaaggagcgtggtctgatggggaaaaagggtttcccggaaagctacgatatgcaccgtctgatgaaatttgttaaagacctgaagagcggtgtgccgaacgttaccgcgccggtgtacagccacctgatctatgatgttattccggacggcgataaaaccgtggttcagccggacatcctgattctggagggtctgaacgtgctgcaaagcggcatggactatccgcacgatccgcaccacgtgtttgttagcgacttcgtggattttagcatctacgttgacgcgccggaggatctgctgcagacctggtacattaaccgtttcctgaaactgcgtgagggtgcgttcaccgacccggatagctactttcacgggtatgcgaaactgaccaaggaagaggcgatcaaaaccgcgatgaccatttggaaggagatgaacagcgtgaacctgaagcaaaacattctgccgacccgtgaacgtgcgagcctgattctgaccaaaagtgcaaaccacatcgtggaggaagttcgtctgcgtaag

SEQ ID NO: 348 - protein, 326 aa, Artificial Sequence
  Engineered variant of Pantothenate Kinase from Escherichia coli
MHHHHHHGGSGSIKEQVEMTPYLQLDRNQWAAVRDSNPMTLSEDEIARLKGINEDLSLEEVALVYLPLSRVLNFYISSSLRRQAQLEQFLGTNGQRIPYIISVAGSVAVGKSTFARVLQALLSRWPEHRRVEHISTDGFLLPNQVLKERGLMGKKGFPESYDMHRLMKFVKDLKSGVPNVTAPVYSHLIYDVIPDGDKTVVQPDILILEGLNVLQSGMDYPHDPHHVFVSDFVDFSIYVDAPEDLLQTWYINRFLKLREGAFTDPDSYFHGYAKLTKEEAIKTAMTIWKEMNSVNLKQNILPTRERASLILTKSANHIVEEVRLRK

SEQ ID NO: 349 - DNA, 978 bp, Artificial Sequence
  Engineered variant of Pantothenate Kinase from Escherichia coli
atgcaccatcatcatcatcatggcggtagcggcagcatcaaagagcagaccgagatgaccccgtacctgcaactggaccgtaaccaatgggcgtcggtgcgtgatagtaacccgatgaccctgagcgaggacgaaaaagcgcgtctgaagggtattaacgaagatctgagcctggaggaagtggcggaagtctacctgccgctgagccgtgttctgaacttctatattagcagcaacctgcgtcgtcaggcgcagctggaacagtttctgggtaccaatggccagcgtatcccgtatatcattagcgttgcgggtagcgtggcggttggcaaaagcacctttgcgcgtgtgctgcaggcgctgctgagccgttggccggagcatcgtcgtgttgaacatatcagcaccgacggcttcctgctgccgaaccaagtgctgaaggagcgtggtctgatggggaaaaagggtttcccggaaagctacgatatgcaccgtctgatgaaatttgttaaagacctgaagagcggtgtgccgaacgttaccgcgccggtgtacagccacctgatctatgatgttattccggacggcgataaaaccgtggttcagccggacatcctgattctggagggtctgaacgtgctgcaaagcggcatggactatccgcacgatccgcaccacgtgtttgttagcgacttcgtggattttagcatctacgttgacgcgccggaggatctgctgcagacctggtacattaaccgtttcctgaaactgcgtgagggtgcgttcaccgacccggatagctactttcacgggtatgcgaaactgaccaaggaagaggcgatcaaaaccgcgatgaccatttggaaggagatgaacagcgtgaacctgaagcaaaacattctgccgacccgtgaacgtgcgagcctgattctgaccaaaagtgcaaaccacatcgtggaggaagttcgtctgcgtaag

SEQ ID NO: 350 - protein, 326 aa, Artificial Sequence
  Engineered variant of Pantothenate Kinase from Escherichia coli
MHHHHHHGGSGSIKEQTEMTPYLQLDRNQWASVRDSNPMTLSEDEKARLKGINEDLSLEEVAEVYLPLSRVLNFYISSNLRRQAQLEQFLGTNGQRIPYIISVAGSVAVGKSTFARVLQALLSRWPEHRRVEHISTDGFLLPNQVLKERGLMGKKGFPESYDMHRLMKFVKDLKSGVPNVTAPVYSHLIYDVIPDGDKTVVQPDILILEGLNVLQSGMDYPHDPHHVFVSDFVDFSIYVDAPEDLLQTWYINRFLKLREGAFTDPDSYFHGYAKLTKEEAIKTAMTIWKEMNSVNLKQNILPTRERASLILTKSANHIVEEVRLRK

SEQ ID NO: 351 - DNA, 978 bp, Artificial Sequence
  Engineered variant of Pantothenate Kinase from Escherichia coli
atgcaccatcatcatcatcatggcggtagcggcagcatcaaagagcagaccgagatgaccccgtacctgcaactggaccgtaaccaatgggcggcggtgcgtgatagtaacccgatgaccctgagcgaggacgaaatcgcgcgtctgaagggtattaacgaagatctgagcctggaggaagtggcggaagtctacctgccgctgagccgtgttctgaacttctatattagcagcaacgagcgtcgtcaggcgcagctggaacagtttctgggtaccaatggccagcgtatcccgtatatcattagcgttgcgggtagcgtggcggttggcaaaagcacctttgcgcgtgtgctgcaggcgctgctgagccgttggtcggagcatcgtcgtgttgaacatatcagcaccgacggcttcctgctgccgaaccaagtgctgaaggagcgtggtctgatggggaaaaagggtttcccggaaagctacgatatgcaccgtctgatgaaatttgttaaagacctgaagagcggtgtgccgaacgttaccgcgccggtgtacagccacctgatctatgatgttattccggacggcgataaaaccgtggttcagccggacatcctgattctggagggtctgaacgtgctgcaaagcggcatggactatgagcatgatccgcaccacacttttgttagcgacttcgtggattttagcatctacgttgacgcgccggaggatctgctgcagacctggtacattaaccgtttcctgaaactgcgtgagggtgcgttcaccgacccggatagctactttcacgggtatgcgaaactgaccaaggaagaggcgatcaaaaccgcgatgaccatttggaaggagatgaacagcgtgaacctgaagcaaaacattctgccgacccgtgaacgtgcgagcctgattctgaccaaaagtgcaaaccacatcgtggaggaagttcgtctgcgtaag

SEQ ID NO: 352 - protein, 326 aa, Artificial Sequence
  Engineered variant of Pantothenate Kinase from Escherichia coli
MHHHHHHGGSGSIKEQTEMTPYLQLDRNQWAAVRDSNPMTLSEDEIARLKGINEDLSLEEVAEVYLPLSRVLNFYISSNERRQAQLEQFLGTNGQRIPYIISVAGSVAVGKSTFARVLQALLSRWSEHRRVEHISTDGFLLPNQVLKERGLMGKKGFPESYDMHRLMKFVKDLKSGVPNVTAPVYSHLIYDVIPDGDKTVVQPDILILEGLNVLQSGMDYEHDPHHTFVSDFVDFSIYVDAPEDLLQTWYINRFLKLREGAFTDPDSYFHGYAKLTKEEAIKTAMTIWKEMNSVNLKQNILPTRERASLILTKSANHIVEEVRLRK

SEQ ID NO: 353 - DNA, 978 bp, Artificial Sequence
  Engineered variant of Pantothenate Kinase from Escherichia coli
atgcaccatcatcatcatcatggcggtagcggcagcatcaaagagcaggttgagatgaccccgtacctgcaactggaccgtaaccaatgggcggcggtgcgtgatagtaacccgatgaccctgagcgaggacgaaatcgcgcgtctgaagggtattaacgaagatctgagcctggaggaagtggcgctggtctacctgccgctgagccgtgttctgaacttctatattagcagcaacctgcgtcgtcaggcgcagctggaacagtttctgggtaccaatggccagcgtatcccgtatatcattagcgttgcgggtagcgtggcggttggcaaaagcacctttgcgcgtgtgctgcaggcgctgctgagccgttggccggagcatcgtcgtgttgaacatatcagcaccgacggcttcctgctgccgaaccaagtgctgaaggagcgtggtctgatggggaaaaagggtttcccggaaagctacgatatgcaccgtctgatgaaatttgttaaagacctgaagagcggtgtgccgaacgttaccgcgccggtgtacagccacctgatctatgatgttgtcccggacggcgataaaaccgtggttcagccggacatcctgattctggagggtctgaacgtgctgcaaagcggcatggactatccgcacgatccgcaccacgtgtttgttagcgacttcgtggattttagcatctacgttgacgcgccggaggatctgctgcagacctggtacattaaccgtttcctgaaactgcgtgagggtgcgttcaccgacccggatagctactttcacgggtatgcgaaactgaccaaggaagaggcgatcaaaaccgcgatgaccatttggaaggagatgaacagcgtgaacctgaagcaaaacattctgccgacccgtgaacgtgcgagcctgattttgaccaaaagtgcaaaccacatcgtggaggaagttcgtctgcgtaag

SEQ ID NO: 354 - protein, 326 aa, Artificial Sequence
  Engineered variant of Pantothenate Kinase from Escherichia coli
MHHHHHHGGSGSIKEQVEMTPYLQLDRNQWAAVRDSNPMTLSEDEIARLKGINEDLSLEEVALVYLPLSRVLNFYISSNLRRQAQLEQFLGTNGQRIPYIISVAGSVAVGKSTFARVLQALLSRWPEHRRVEHISTDGFLLPNQVLKERGLMGKKGFPESYDMHRLMKFVKDLKSGVPNVTAPVYSHLIYDVVPDGDKTVVQPDILILEGLNVLQSGMDYPHDPHHVFVSDFVDFSIYVDAPEDLLQTWYINRFLKLREGAFTDPDSYFHGYAKLTKEEAIKTAMTIWKEMNSVNLKQNILPTRERASLILTKSANHIVEEVRLRK

SEQ ID NO: 355 - DNA, 978 bp, Artificial Sequence
  Engineered variant of Pantothenate Kinase from Escherichia coli
atgcaccatcatcatcatcatggcggtagcggcagcatcaaagagcagaccgagatgaccccgtacctgcaactggaccgtaaccaatgggcggcggtgcgtcgcagtaacccgatgaccctgagcgaggacgaaatcgcgcgtctgaagggtattaacgaagatctgagcctggaggaagtggcggaagtctacctgccgctgagccgtgttctgaacttctatattctgagcaacctgcgtcgtcaggcgcagctggaacagtttctgggtaccaatggccagcgtatcccgtatatcattagcgttgcgggtagcgtggcggttggcaaaagcacctttgcgcgtgtgctgcaggcgctgctgagccgttggccggagcatcgtcgtgttgaacatatcagcaccgacggcttcctgctgccgaaccaagtcctgaaggagcgtggtctgatggggaaaaagggtttcccggaaagctacgatatgcaccgtctgatgaaatttgttaaagacctgaagagcggtgtgccgaacgttaccgcgccggtgtacagccacctgatctatgatgttattccggacggcgataaaaccgtggttcagccggacatcctgattctggagggtctgaacgtgctgcaaagcggctgcgactatccgcacgatccgcaccacgtgtttgttagcgacttcgtggattttagcatctacgttgacgcgccggaggatctgctgcagacctggtacattaaccgtttcctgaaactgcgtgagggtgcgttcaccgacccggatagctactttcacgggtatgcgaagctgaccaaggaagaggcgatcaaaaccgcgatgaccatttggaaggagatgaacagcgtgaacctgaagcaaaacattctgccgacccgtgaacgtgcgagcctgattctgaccaaaagtgcaaaccacatcgtggaggaagttcgtctgcgtaag

SEQ ID NO: 356 - protein, 326 aa, Artificial Sequence
  Engineered variant of Pantothenate Kinase from Escherichia coli
MHHHHHHGGSGSIKEQTEMTPYLQLDRNQWAAVRRSNPMTLSEDEIARLKGINEDLSLEEVAEVYLPLSRVLNFYILSNLRRQAQLEQFLGTNGQRIPYIISVAGSVAVGKSTFARVLQALLSRWPEHRRVEHISTDGFLLPNQVLKERGLMGKKGFPESYDMHRLMKFVKDLKSGVPNVTAPVYSHLIYDVIPDGDKTVVQPDILILEGLNVLQSGCDYPHDPHHVFVSDFVDFSIYVDAPEDLLQTWYINRFLKLREGAFTDPDSYFHGYAKLTKEEAIKTAMTIWKEMNSVNLKQNILPTRERASLILTKSANHIVEEVRLRK

SEQ ID NO: 357 - DNA, 978 bp, Artificial Sequence
  Engineered variant of Pantothenate Kinase from Escherichia coli
atgcaccatcatcatcatcatggcggtagcggcagcatcaaagagcagaccgagatgaccccgtacctgcaactgacgcgtaaccaatggcgtgcgattcgtagtagtaacccgatgaccctgagcgaggacgaaatcgcgcgtctgaagggtattaacgaagatctgagcctggaggaagtggcggaagtctacctgccgctgagccgtgttctgaacttctatgttagcagcgccctgcgtcgtcaggcgcagctggaacagtttctgggtaccaatagtcagcgtatcccgtatatcattagcgttgcgggtagcgtggcggttggcaaaagcacctttgcgcgtgtgctgcaggcgctgctgagccgttggccggagcatcgtcgtgttgaacatatcagcaccgacggcttcctgctgccgaaccaagtgctgaaggagcgtggtctgatggggaaaaagggtttcccggaaagctacgatatgcaccgtctgatgaaatttgttaaagacctgaagagcggtgtgccgaacgttaccgcgccggtgtacagccacctgatctatgatgttattccggacggcgataaaaccgtggttcagccggacatcctgattctggagggtctgaacgtgctgcaaagcggcatggactatgagcatgatccgcaccacgtatttgttagcgacttcgtggattttagcatctacgttgacgcgccggaggatctgctgcagacctggtacattaaccgtttcctgaaactgcgtgagggtgcgttcaccgacccggatagctactttcacgggtatgcgaaactgaccaaggaagaggcgatcaaaaccgcgatgaccatttggaaggagatgaacctggtgaacctgaagcaaaacattctgccgacccgtgaacgtgcgagcctgattttgaccaaaagtgcaaaccacatcgtggaggaagttcgtctgcgtaag

SEQ ID NO: 358 - protein, 326 aa, Artificial Sequence
  Engineered variant of Pantothenate Kinase from Escherichia coli
MHHHHHHGGSGSIKEQTEMTPYLQLTRNQWRAIRSSNPMTLSEDEIARLKGINEDLSLEEVAEVYLPLSRVLNFYVSSALRRQAQLEQFLGTNSQRIPYIISVAGSVAVGKSTFARVLQALLSRWPEHRRVEHISTDGFLLPNQVLKERGLMGKKGFPESYDMHRLMKFVKDLKSGVPNVTAPVYSHLIYDVIPDGDKTVVQPDILILEGLNVLQSGMDYEHDPHHVFVSDFVDFSIYVDAPEDLLQTWYINRFLKLREGAFTDPDSYFHGYAKLTKEEAIKTAMTIWKEMNLVNLKQNILPTRERASLILTKSANHIVEEVRLRK

SEQ ID NO: 359 - DNA, 978 bp, Artificial Sequence
  Engineered variant of Pantothenate Kinase from Escherichia coli
atgcaccatcatcatcatcatggcggtagcggcagcatcaaagagcagaccgagatgaccccgtacctgcaactggatcgtaaccaatgggccgcgattcgtgacagtaacccgatgaccctgagcgaggacgaaatcgcgcgtctgaagggtattaacgaagatctgagcctggaggaagtggcggaagtctacctgccgctgagccgtgttctgaacttctatgttagcagcgccctgcgtcgtcaggcgcagctggaacagtttctgggtaccaatggtcagcgtatcccgtatatcattagcgttgcgggtagcgtggcggttggcaaaagcacctttgcgcgtgtgctgcaggcgctgctgagccgttggccggagcatcgtcgtgttgaacatatcagcaccgacggcttcctgctgccgaaccaagtgctgaaggagcgtggtctgatggggaaaaagggtttcccggaaagctacgatatgcaccgtctgatgaaatttgttaaagacctgaagagcggtgtgccgaacgttaccgcgccggtgtacagccacctgatctatgatgttattcctgacggcgataaaaccgtggttcagccggacatcctgattctggagggtctgaacgtgctgcaaagcggcatggactatccgcacgatccgcaccacgtgtttgttagcgacttcgtggattttagcatctacgttgacgcgccggaggatctgctgcagacctggtacattaaccgtttcctgaaactgcgtgagggtgcgttcaccgacccggatagctactttcacgggtatgcgaaactgaccaaggaagaggcgatcaaaaccgcgatgaccatttggaaggagatgaacagcgtgaacctgaagcaaaacattctgccgacccgtgaacgtgcgagcctgattttgaccaaaagtgcaaaccacatcgtggaggaagttcgtctgcgtaag

SEQ ID NO: 360 - protein, 326 aa, Artificial Sequence
  Engineered variant of Pantothenate Kinase from Escherichia coli
MHHHHHHGGSGSIKEQTEMTPYLQLDRNQWAAIRDSNPMTLSEDEIARLKGINEDLSLEEVAEVYLPLSRVLNFYVSSALRRQAQLEQFLGTNGQRIPYIISVAGSVAVGKSTFARVLQALLSRWPEHRRVEHISTDGFLLPNQVLKERGLMGKKGFPESYDMHRLMKFVKDLKSGVPNVTAPVYSHLIYDVIPDGDKTVVQPDILILEGLNVLQSGMDYPHDPHHVFVSDFVDFSIYVDAPEDLLQTWYINRFLKLREGAFTDPDSYFHGYAKLTKEEAIKTAMTIWKEMNSVNLKQNILPTRERASLILTKSANHIVEEVRLRK

SEQ ID NO: 361 - DNA, 978 bp, Artificial Sequence
  Engineered variant of Pantothenate Kinase from Escherichia coli
atgcaccatcatcatcatcatggcggtagcggcagcatcaaagagcagaccgagatgaccccgtacctgcaactggaccgtaaccaatgggcggcggtgcgtgatagtaacccgatgaccctgagcgaggacgaaaaagcgcgtctgaagggtattaacgaagatctgagcctggaggaagtggcggaagtctacctgccgctgagccgtgttctgaacttctatattagcagcaacctgcgtcgtcaggcgcagctggaacagtttctgggtaccaatggccagcctatcccgtatatcattagcgttgcgggtagcgtggcggttggcaaaagcacctttgcgcgtgtgctgcaggcgctgctgagccgttggccggagcatcgtcgtgttgaacatatcagcaccgacggcttcctgctgccgaaccaagtgctgaaggagcgtggtctgatggggaaaaagggtttcccggaaagctacgatatgcctcgtctgatgaaatttgttaaagacctgaagagcggtgtgccgaacgttaccgcgccggtgtacagccacctgatctatgatgttattccggacggcgataaaaccgtggttcagccggacatcctgattctggagggtctgaacgtgctgcaaagcggcatggactatccgcacgatccgcaccacgtgtttgttagcgacttcgtggattttagcatctacgttgacgcgccggaggatctgctgcagacctggtacattaaccgtttcctgaaactgcgtgagggtgcgttcaccgacccggatagctactttcacgggtatgcgaaactgaccaaggaagaggcgatcaaaaccgcgatgaccatttggaaggagatgaacagcgtgaacctgaagcaaaacattctgccgacccgtgaacgtgcgagcctgattctgaccaaaagtgcaaaccacatcgtggaggaagttcgtctgcgtaag

SEQ ID NO: 362 - protein, 326 aa, Artificial Sequence
  Engineered variant of Pantothenate Kinase from Escherichia coli
MHHHHHHGGSGSIKEQTEMTPYLQLDRNQWAAVRDSNPMTLSEDEKARLKGINEDLSLEEVAEVYLPLSRVLNFYISSNLRRQAQLEQFLGTNGQPIPYIISVAGSVAVGKSTFARVLQALLSRWPEHRRVEHISTDGFLLPNQVLKERGLMGKKGFPESYDMPRLMKFVKDLKSGVPNVTAPVYSHLIYDVIPDGDKTVVQPDILILEGLNVLQSGMDYPHDPHHVFVSDFVDFSIYVDAPEDLLQTWYINRFLKLREGAFTDPDSYFHGYAKLTKEEAIKTAMTIWKEMNSVNLKQNILPTRERASLILTKSANHIVEEVRLRK

SEQ ID NO: 363 - DNA, 978 bp, Artificial Sequence
  Engineered variant of Pantothenate Kinase from Escherichia coli
atgcaccatcatcatcatcatggcggtagcggcagcatcaaagagcagaccgagatgaccccgtacctgcaactggaccgtaaccaatgggcggcggtggccgatagtaacccgatgaccctgagcgaggacgaaaaagcgcgtctgaagggtattaacgaagatctgagcctggaggaagtggcggaagtctacctgccgctgagccgtgttctgaacttctatattagcagcagtctgcgtcgtcaggcgcagctggaacagtttctgggtaccaatggccagcgtatcccgtatatcattagcgttgcgggtagcgtggcggttggcaaaagcacctttgcgcgtgtgctgcaggcgctgctgagccgttggccggagcatcgtcgtgttgaacatatcagcaccgacggcttcctgctgccgaaccaagtgctgaaggagcgtggtctgatggggaaaaagggtttcccggaaagctacgatatgcctcgtctgatgaaatttgttaaagacctgaagagcggtgtgccgaacgttaccgcgccggtgtacagccacctgatctatgatgttattccggacggcgataaaaccgtggttcagccggacatcctgattctggagggtctgaacgtgctgcaaagcggcatggactatccgcacgatccgcaccacgtgtttgttagcgacttcgtggattttagcatctacgttgacgcgccggaggatctgctgcagacctggtacattaaccgtttcctgaaactgcgtgagggtgcgttcaccgacccggatagctactttcacgggtatgcgaaactgaccaaggaagaggcgatcaaaaccgcgatgaccatttggaaggagatgaacagcgtgaacctgaagcaaaacattctgccgacccgtgaacgtgcgagcctgattctgaccaaaagtgcaaaccacatcgtggaggaagttcgtctgcgtaag

SEQ ID NO: 364 - protein, 326 aa, Artificial Sequence
  Engineered variant of Pantothenate Kinase from Escherichia coli
MHHHHHHGGSGSIKEQTEMTPYLQLDRNQWAAVADSNPMTLSEDEKARLKGINEDLSLEEVAEVYLPLSRVLNFYISSSLRRQAQLEQFLGTNGQRIPYIISVAGSVAVGKSTFARVLQALLSRWPEHRRVEHISTDGFLLPNQVLKERGLMGKKGFPESYDMPRLMKFVKDLKSGVPNVTAPVYSHLIYDVIPDGDKTVVQPDILILEGLNVLQSGMDYPHDPHHVFVSDFVDFSIYVDAPEDLLQTWYINRFLKLREGAFTDPDSYFHGYAKLTKEEAIKTAMTIWKEMNSVNLKQNILPTRERASLILTKSANHIVEEVRLRK

SEQ ID NO: 365 - DNA, 978 bp, Artificial Sequence
  Engineered variant of Pantothenate Kinase from Escherichia coli
atgcaccatcatcatcatcatggcggtagcggcagcatcaaagagcagaccgagatgaccccgtacctgcaactggaccgtaaccaatgggcggcggtggccgatagtaacccgatgaccctgagcgaggacgaaatcgcgcgtctgaagggtattaacgaagatctgagcctggaggaagtggcgctggtctacctgccgctgagccgtgttctgaacttctatattagcagcaacctgcgtcgtcaggcgcagctggaacagtttctgggtaccaatggccagcgtatcccgtatatcattagcgttgcgggtagcgtggcggttggcaaaagcacctttgcgcgtgtgctgcaggcgctgctgagccgttgggtagagcatagccgcgttgaacatatcagcaccgacggcttcctgctgccgaaccaagtgctgaaggagcgtggtctgatggggaaaaagggtttcccggaaagctacgatatgcaccgtctgatgaaatttgttaaagacctgaagagcggtgtgccgaacgttaccgcgccggtgtacagccacctgatctatgatgttgtcccggacggcgataaaaccgtggttcagccggacatcctgattctggagggtctgaacgtgctgcaaagcggcatggactatccgcacgatccgcaccacgtgtttgttagcgacttcgtggattttagcatctacgttgacgcgccggaggatctgctgcagacctggtacattaaccgtttcctgaaactgcgtgagggtgcgttcaccgacccggatagctactttcacgggtatgcgaaactgaccaaggaagaggcgatcaaaaccgcgatgaccatttggaaggagatgaacagcgtgaacctgaagcaaaacattctgccgacccgtgaacgtgcgagcctgattctgaccaaaagtgcaaaccacatcgtggaggaagttcgtctgcgtaag

SEQ ID NO: 366 - protein, 326 aa, Artificial Sequence
  Engineered variant of Pantothenate Kinase from Escherichia coli
MHHHHHHGGSGSIKEQTEMTPYLQLDRNQWAAVADSNPMTLSEDEIARLKGINEDLSLEEVALVYLPLSRVLNFYISSNLRRQAQLEQFLGTNGQRIPYIISVAGSVAVGKSTFARVLQALLSRWVEHSRVEHISTDGFLLPNQVLKERGLMGKKGFPESYDMHRLMKFVKDLKSGVPNVTAPVYSHLIYDVVPDGDKTVVQPDILILEGLNVLQSGMDYPHDPHHVFVSDFVDFSIYVDAPEDLLQTWYINRFLKLREGAFTDPDSYFHGYAKLTKEEAIKTAMTIWKEMNSVNLKQNILPTRERASLILTKSANHIVEEVRLRK

SEQ ID NO: 367 - DNA, 978 bp, Artificial Sequence
  Engineered variant of Pantothenate Kinase from Escherichia coli
atgcaccatcatcatcatcatggcggtagcggcagcatcaaagagcagaccgagatgaccccgtacctgcaactggaccgtaaccaatgggcggcggtgcgtgatagtaacccgatgaccctgagcgaggacgaaaaagcgcgtctgaagggtattaacgaagatctgagcctggaggaagtggcgctggtctacctgccgctgagccgtgttctgaacttctatattagcagcaacctgcgtcgtcaggcgcagctggaacagtttctgggtaccaatggccagcgtatcccgtatatcattagcgttgcgggtagcgtggcggttggcaaaagcacctttgcgcgtgtgctgcaggcgctgctgagccgttggccggagcatcgtcgtgttgaacatatcagcaccgacggcttcctgctgccgaaccaagtgctgaaggagcgtggtctgatggggaaaaagggtttcccggaaagctacgatatgcaccgtctgatgaaatttgttaaagacctgaagagcggtgtgccgaacgttaccgcgccggtgtacagccacctgatctatgatgttattccggacggcgataaaaccgtggttcagccggacatcctgattctggagggtctgaacgtgctgcaaagcggcatggactatccgcacgatccgcaccacgtgtttgttagcgacttcgtggattttagcatctacgttgacgcgccggaggatctgctgcagacctggtacattaaccgtttcctgaaactgcgtgagggtgcgttcaccgacccggatagctactttcacgggtatgcgaaactgaccaaggaagaggcgatcaaaaccgcgatgaccatttggaaggagatgaacagcgtgaacctgaagcaaaacattctgccgacccgtgaacgtgcgagcctgattctgaccaaaagtgcaaaccacatcgtggaggaagttcgtctgcgtaag

SEQ ID NO: 368 - protein, 326 aa, Artificial Sequence
  Engineered variant of Pantothenate Kinase from Escherichia coli
MHHHHHHGGSGSIKEQTEMTPYLQLDRNQWAAVRDSNPMTLSEDEKARLKGINEDLSLEEVALVYLPLSRVLNFYISSNLRRQAQLEQFLGTNGQRIPYIISVAGSVAVGKSTFARVLQALLSRWPEHRRVEHISTDGFLLPNQVLKERGLMGKKGFPESYDMHRLMKFVKDLKSGVPNVTAPVYSHLIYDVIPDGDKTVVQPDILILEGLNVLQSGMDYPHDPHHVFVSDFVDFSIYVDAPEDLLQTWYINRFLKLREGAFTDPDSYFHGYAKLTKEEAIKTAMTIWKEMNSVNLKQNILPTRERASLILTKSANHIVEEVRLRK

SEQ ID NO: 369 - DNA, 978 bp, Artificial Sequence
  Engineered variant of Pantothenate Kinase from Escherichia coli
atgcaccatcatcatcatcatggcggtagcggcagcatcaaagagcagaccgagatgaccccgtacctgcaactggaccgtaaccaatgggcggcggtgcgtgatagtaacccgatgaccctgagcgaggacgaaatcgcgcgtctgaagggtattaacgaagatctgagcctggaggaagtggcggaagtctacctgccgctgagccgtgttctgaacttctatattagcagcaacctgcgtcgtcaggcgcagctggaacagtttctgggtaccaatggccagcgtatcccgtatatcattagcgttgcgggtagcgtggcggttggcaaaagcacctttgcgcgtgtgctgcaggcgctgctgagccgttggccggagcatcgtcgtgttgaacatatcagcaccgacggcttcctgctgccgaaccaagtgctgaaggagcgtggtctgatggggaaaaagggtttcccggaaagctacgatatgcaccgtctgatgaaatttgttaaagacctgaagagcggtgtgccgaacgttaccgcgccggtgtacagccacctgatctatgatgttattccggacggcgataaaaccgtggttcagccggacatcctgattctggagggtctgaacgtgctgcaaagcggcatggactatccgcacgatccgcaccacgtgtttgttagcgacttcgtggattttagcatctacgttgacgcgccggaggatctgctgcagacctggtacattaaccgtttcctgaaactgcgtgagggtgcgttcaccgacccggatagctactttcacgggtatgcggcactgaccaaggaagaggcgatcaaaaccgcgatgaccatttggaaggagatgaacagcgtgaacctgaagcaaaacattctgccgacccgtgaacgtgcgagcctgattctgaccaaaagtgcaaaccacatcgtggaggaagttcgtctgcgtaag

SEQ ID NO: 370 - protein, 326 aa, Artificial Sequence
  Engineered variant of Pantothenate Kinase from Escherichia coli
MHHHHHHGGSGSIKEQTEMTPYLQLDRNQWAAVRDSNPMTLSEDEIARLKGINEDLSLEEVAEVYLPLSRVLNFYISSNLRRQAQLEQFLGTNGQRIPYIISVAGSVAVGKSTFARVLQALLSRWPEHRRVEHISTDGFLLPNQVLKERGLMGKKGFPESYDMHRLMKFVKDLKSGVPNVTAPVYSHLIYDVIPDGDKTVVQPDILILEGLNVLQSGMDYPHDPHHVFVSDFVDFSIYVDAPEDLLQTWYINRFLKLREGAFTDPDSYFHGYAALTKEEAIKTAMTIWKEMNSVNLKQNILPTRERASLILTKSANHIVEEVRLRK

SEQ ID NO: 371 - DNA, 978 bp, Artificial Sequence
  Engineered variant of Pantothenate Kinase from Escherichia coli
atgcaccatcatcatcatcatggcggtagcggcagcatcaaagagcagaccgagatgaccccgtacctgcaactggatcgtaaccaatggcgtgcgattcgtagtagtaacccgatgaccctgagcgaggacgaaatcgcgcgtctgaagggtattaacgaagatctgagcctggaggaagtggcggaagtctacctgccgctgagccgtgttctgaacttctatgttagcagcaacctgcgtcgtcaggcgcagctggaacagtttctgggtaccaatggccagcgtatcccgtatatcattagcgttgcgggtagcgtggcggttggcaaaagcacctttgcgcgtgtgctgcaggcgctgctgagccgttggccggagcatcgtcgtgttgaacatatcagcaccgacggcttcctgcacccgaaccaagtgctgaaggagcgtggtctgatggggaaaaagggtttcccggaaagctacgatatgcaccgtctgatgaaatttgttaaagacctgaagagcggtgtgccgaacgttaccgcgccggtgtacagccacctgatctatgatgttattccggacggcgataaaaccgtggttcagccggacatcctgattctggagggtctgaacgtgctgcaaagcggcatggactatcctcatgatccgcaccacgtatttgttagcgacttcgtggattttagcatctacgttgacgcgccggaggatctgctgcagacctggtacattaaccgtttcctgaaactgcgtgagggtgcgttcaccgacccggatagctactttcacgggtatgcgaaactgaccaaggaagaggcgatcaaaaccgcgatgaccatttggaaggagatgaacctggtgaacctgaagcaaaacattctaccgacccgtgaacgtgcgagcctgattttgaccaaaagtgcaaaccacatcgtggaggaagttcgtctgcgtaag

SEQ ID NO: 372 - protein, 326 aa, Artificial Sequence
  Engineered variant of Pantothenate Kinase from Escherichia coli
MHHHHHHGGSGSIKEQTEMTPYLQLDRNQWRAIRSSNPMTLSEDEIARLKGINEDLSLEEVAEVYLPLSRVLNFYVSSNLRRQAQLEQFLGTNGQRIPYIISVAGSVAVGKSTFARVLQALLSRWPEHRRVEHISTDGFLHPNQVLKERGLMGKKGFPESYDMHRLMKFVKDLKSGVPNVTAPVYSHLIYDVIPDGDKTVVQPDILILEGLNVLQSGMDYPHDPHHVFVSDFVDFSIYVDAPEDLLQTWYINRFLKLREGAFTDPDSYFHGYAKLTKEEAIKTAMTIWKEMNLVNLKQNILPTRERASLILTKSANHIVEEVRLRK

SEQ ID NO: 373 - DNA, 978 bp, Artificial Sequence
  Engineered variant of Pantothenate Kinase from Escherichia coli
atgcaccatcatcatcatcatggcggtagcggcagcatcaaagagcagaccgagatgaccccgtacctgcaactggaccgtaaccaatgggcggcggtgcgtgatagtaacccgatgaccctgagcgaggacgaaatcgcgcgtctgaagggtattaacgaagatctgagcctggaggaagtggcgctggtctacctgccgctgagccgtgttctgaacttctatattagcagcaacctgcgtcgtcaggcgcagctggaacagtttctgggtaccaatggccagcgtatcccgtatatcattagcgttgcgggtagcgtggcggttggcaaaagcacctttgcgcgtgtgctgcaggcgctgctgagccgttggccggagcatcgtcgtgttgaacatatcagcaccgacggcttcctgctgccgaaccaagtgctgaaggagcgtggtctgatggggaaaaagggtttcccggaaagctacgatatgcaccgtctgatgaaatttgttaaagacctgaagagcggtgtgccgaacgttaccgcgccggtgtacagccacctgatctatgatgttatcccggacggcgataaaaccgtggttcagccggacatcctgattctggagggtctgaacgtgctgcaaagcggcatggactatccgcacgatccgcaccacgtgtttgttagcgacttcgtggattttagcatctacgttgacgcgccggaggatctgctgcagacctggtacattaaccgtttcctgaaactgcgtgagggtgcgttcaccgacccggatagctactttcacgggtatgcgaaactgaccaaggaagaggcgatcaaaaccgcgatgaccatttggaaggagatgaacagcgtgaacctgaagcaaaacattctgccgacccgtgaacgtgcgagcctgattttgaccaaaagtgcaaaccacatcgtggaggaagttcgtctgcgtaag

SEQ ID NO: 374 - protein, 326 aa, Artificial Sequence
  Engineered variant of Pantothenate Kinase from Escherichia coli
MHHHHHHGGSGSIKEQTEMTPYLQLDRNQWAAVRDSNPMTLSEDEIARLKGINEDLSLEEVALVYLPLSRVLNFYISSNLRRQAQLEQFLGTNGQRIPYIISVAGSVAVGKSTFARVLQALLSRWPEHRRVEHISTDGFLLPNQVLKERGLMGKKGFPESYDMHRLMKFVKDLKSGVPNVTAPVYSHLIYDVIPDGDKTVVQPDILILEGLNVLQSGMDYPHDPHHVFVSDFVDFSIYVDAPEDLLQTWYINRFLKLREGAFTDPDSYFHGYAKLTKEEAIKTAMTIWKEMNSVNLKQNILPTRERASLILTKSANHIVEEVRLRK

SEQ ID NO: 375 - DNA, 978 bp, Artificial Sequence
  Engineered variant of Pantothenate Kinase from Escherichia coli
atgcaccatcatcatcatcatggcggtagcggcagcatcaaagagcagaccgagctgaccccgtacctgcaactggaccgtaaccaatgggcggcggtgcgtgatagtaacccgatgaccctgagcgaggacgaaatcgcgcgtctgaagggtattaacgaagatctgagcctggaggaagtggcggaagtctacctgccgctgagccgtgttctgaacttctatattagcagcaacctgcgtcgtcaggcgcagctggaacagtttctgggtaccaatggccagcgtatcccgtatatcattagcgttgcgggtagcgtggcggttggcaaaagcacctttgcgcgtgtgctgcaggcgctgctgagccgttggccggagcatcgtcgtgttgaacatatcagcaccgacggcttcctgcacccgaaccaagtgctgaaggagcgtggtctgatggggaaaaagggtttcccggaaagctacgatatgcaccgtctgatgaaatttgttaaagacctgaagagcggtgtgccgaacgttaccgcgccggtgtacagccacctgatctatgatgttattccggacggcgataaaaccgtggttcagccggacatcctgattctggagggtctgaacgtgctgcaaagcggcatggactatccgcacgatccgtatcacgtgtttgttagcgacttcgtggattttagcatctacgttgacgcgccggaggatctgctgcagacctggtacattaaccgtttcctgaaactgcgtgagggtgcgttcaccgacccggatagctactttcacgggtatgcgaagctgaccaaggaagaggcgatcaaaaccgcgatgaccatttggaaggagatgaacagcgtgaacctgaagcaaaacattctgccgacccgtgaacgtgcgagcctgattctgaccaaaagtgcaaaccacatcgtggaggaagttcgtctgcgtaag

SEQ ID NO: 376 - protein, 326 aa, Artificial Sequence
  Engineered variant of Pantothenate Kinase from Escherichia coli
MHHHHHHGGSGSIKEQTELTPYLQLDRNQWAAVRDSNPMTLSEDEIARLKGINEDLSLEEVAEVYLPLSRVLNFYISSNLRRQAQLEQFLGTNGQRIPYIISVAGSVAVGKSTFARVLQALLSRWPEHRRVEHISTDGFLHPNQVLKERGLMGKKGFPESYDMHRLMKFVKDLKSGVPNVTAPVYSHLIYDVIPDGDKTVVQPDILILEGLNVLQSGMDYPHDPYHVFVSDFVDFSIYVDAPEDLLQTWYINRFLKLREGAFTDPDSYFHGYAKLTKEEAIKTAMTIWKEMNSVNLKQNILPTRERASLILTKSANHIVEEVRLRK

SEQ ID NO: 377 - DNA, 978 bp, Artificial Sequence
  Engineered variant of Pantothenate Kinase from Escherichia coli
atgcaccatcatcatcatcatggcggtagcggcagcatcaaagagcagaccgagatgaccccgtacctgcaactggatcgtaaccaatggcgtgcgattcgtgacagtaacccgatgaccctgagcgaggacgaaatcgcgcgtctgaagggtattaacgaagatctgagcctggaggaagtggcggaagtctacctgccgctgagccgtgttctgaacttctatattagcagcaacctgcgtcgtcaggcgcagctggaacagtttctgggtaccaatggccagcgtatcccgtatatcattagcgttgcgggtagcgtggcggttggcaaaagcacctttgcgcgtgtgctgcagacgctgctgagccgttggccggagcatcgtcgtgttgaacatatcagcaccgacggcttcctgctgccgaaccaagtgctgaaggagcgtggtctgatggggaaaaagggtttcccggaaagctacgatatgcaccgtctgatgaaatttgttaaagacctgaagagcggtgtgccgaacgttaccgcgccggtgtacagccacctgatctatgatgttattccggacggcgataaaaccgtggttcagccggacatcctgattctggagggtctgaacgtgctgcaaagcggcatggactatccgcacgatccgcaccacgtgtttgttagcgacttcgtggattttagcatctacgttgacgcgccggaggatctgctgcagacctggtacattaaccgtttcctgaaactgcgtgagggtgcgttcaccgacccggatagctactttcacgggtatgcgaaactgaccaaggaagaggcgatcaaaaccgcgatgaccatttggaaggagatgaacagcgtgaacctgaagcaaaacattctgccgacccgtgaacgtgcgagcctgattttgaccaaaagtgcgaaccacatcgtggaggaagttcgtctgcgtaag

SEQ ID NO: 378 - protein, 326 aa, Artificial Sequence
  Engineered variant of Pantothenate Kinase from Escherichia coli
MHHHHHHGGSGSIKEQTEMTPYLQLDRNQWRAIRDSNPMTLSEDEIARLKGINEDLSLEEVAEVYLPLSRVLNFYISSNLRRQAQLEQFLGTNGQRIPYIISVAGSVAVGKSTFARVLQTLLSRWPEHRRVEHISTDGFLLPNQVLKERGLMGKKGFPESYDMHRLMKFVKDLKSGVPNVTAPVYSHLIYDVIPDGDKTVVQPDILILEGLNVLQSGMDYPHDPHHVFVSDFVDFSIYVDAPEDLLQTWYINRFLKLREGAFTDPDSYFHGYAKLTKEEAIKTAMTIWKEMNSVNLKQNILPTRERASLILTKSANHIVEEVRLRK

SEQ ID NO: 379 - DNA, 978 bp, Artificial Sequence
  Engineered variant of Pantothenate Kinase from Escherichia coli
atgcaccatcatcatcatcatggcggtagcggcagcatcaaagagcagaccgagatgaccccgtacctgcaactgacgcgtaaccaatggcgtgcgattcgtgacagtaacccgatgaccctgagcgaggacgaaatcgcgcgtctgaagggtattaacgaagatctgagcctggaggaagtggcggaagtctacctgccgctgagccgtgttctgaacttctatgttagcagcgccctgcgtcgtcaggcgcagctggaacagtttctgggtaccaatggccagcgtatcccgtatatcattagcgttgcgggtagcgtggcggttggcaaaagcacctttgcgcgtgtgctgcaggcgctgctgagccgttggccggagcatcgtcgtgttgaacatatcagcaccgacggcttcctgctgccgaaccaagtgctgaaggagcgtggtctgatggggaaaaagggtttcccggaaagctacgatatgcaccgtctgatgaaatttgttaaagacctgaagagcggtgtgccgaacgttaccgcgccggtgtacagccacctgatctatgatgttattccggacggcgataaaaccgtggttcagccggacatcctgattctggagggtctgaacgtgctgcaaagcggcatggactatccgcacgatccgcaccacgtgtttgttagcgacttcgtggattttagcatctacgttgacgcgccggaggatctgctgcagacctggtacattaaccgtttcctgaaactgcgtgagggtgcgttcaccgacccggatagctactttcacgggtatgcgaaactgaccaaggaagaggcgatcaaaaccgcgatgaccatttggaaggagatgaacagcgtgaacctgaagcaaaacattctgccgacccgtgaacgtgcgagcctgattttgaccaaaagtgcaaaccacatcgtggaggaagttcgtctgcgtaag

SEQ ID NO: 380 - protein, 326 aa, Artificial Sequence
  Engineered variant of Pantothenate Kinase from Escherichia coli
MHHHHHHGGSGSIKEQTEMTPYLQLTRNQWRAIRDSNPMTLSEDEIARLKGINEDLSLEEVAEVYLPLSRVLNFYVSSALRRQAQLEQFLGTNGQRIPYIISVAGSVAVGKSTFARVLQALLSRWPEHRRVEHISTDGFLLPNQVLKERGLMGKKGFPESYDMHRLMKFVKDLKSGVPNVTAPVYSHLIYDVIPDGDKTVVQPDILILEGLNVLQSGMDYPHDPHHVFVSDFVDFSIYVDAPEDLLQTWYINRFLKLREGAFTDPDSYFHGYAKLTKEEAIKTAMTIWKEMNSVNLKQNILPTRERASLILTKSANHIVEEVRLRK

SEQ ID NO: 381 - DNA, 978 bp, Artificial Sequence
  Engineered variant of Pantothenate Kinase from Escherichia coli
atgcaccatcatcatcatcatggcggtagcggcagcatcaaagagcagaccgagatgaccccgtacctgcaactggatcgtaaccaatgggccgcgattcgtagtagtaacccgatgaccctgagcgaggacgaaatcgcgcgtctgaagggtattaacgaagatctgagcctggaggaagtggcggaagtctacctgccgctgagccgtgttctgaacttctatattagcagcaacctgcgtcgtcaggcgcagctggaacagtttctgggtaccaatggccagcgtatcccgtatatcattagcgttgcgggtagcgtggcggttggcaaaagcacctttgcgcgtgtgctgcaggcgctgctgagccgttggtcggagcatcgtcgtgttgaacatatcagcaccgacggcttcctgctgccgaaccaagtgctgaaggagcgtggtctgatggggaaaaagggtttcccggaaagctacgatatgcaccgtctgatgaaatttgttaaagacctgaagagcggtgtgccgaacgttaccgcgccggtgtacagccacctgatctatgatgttattcctgacggcgatcgtaccgtggttcagccggacatcctgattctggagggtctgaacgtgctgcaaagcggcatggactatccgcacgatccgcaccacgtgtttgttagcgacttcgtggattttagcatctacgttgacgcgccggaggatctgctgcagacctggtacattaaccgtttcctgaaactgcgtgagggtgcgttcaccgacccggatagctactttcacgggtatgcgaaactgaccaaggaagaggcgatcaaaaccgcgatgaccatttggaaggagatgaacctggtgaacctgaagcaaaacattctgccgacccgtgaacgtgcgagcctgattttgaccaaaagtgcaaaccacatcgtggaggaagttcgtctgcgtaag

SEQ ID NO: 382 - protein, 326 aa, Artificial Sequence
  Engineered variant of Pantothenate Kinase from Escherichia coli
MHHHHHHGGSGSIKEQTEMTPYLQLDRNQWAAIRSSNPMTLSEDEIARLKGINEDLSLEEVAEVYLPLSRVLNFYISSNLRRQAQLEQFLGTNGQRIPYIISVAGSVAVGKSTFARVLQALLSRWSEHRRVEHISTDGFLLPNQVLKERGLMGKKGFPESYDMHRLMKFVKDLKSGVPNVTAPVYSHLIYDVIPDGDRTVVQPDILILEGLNVLQSGMDYPHDPHHVFVSDFVDFSIYVDAPEDLLQTWYINRFLKLREGAFTDPDSYFHGYAKLTKEEAIKTAMTIWKEMNLVNLKQNILPTRERASLILTKSANHIVEEVRLRK

SEQ ID NO: 383 - DNA, 978 bp, Artificial Sequence
  Engineered variant of Pantothenate Kinase from Escherichia coli
atgcaccatcatcatcatcatggcggtagcggcagcatcaaagagcagaccgagatgaccccgtacctgcaactggatcgtaaccaatggcgtgcgattcgtgacagtaacccgatgaccctgagcgaggacgaaatcgcgcgtctgaagggtattaacgaagatctgagcctggaggaagtggcggaagtctacctgccgctgagccgtgttctgaacttctatgttagcagcgccgagcgtcgtcaggcgcagctggaacagtttctgggtaccaatagtcagcgtatcccgtatatcattagcgttgcgggtagcgtggcggttggcaaaagcacctttgcgcgtgtgctgcaggcgctgctgagccgttggccggagcatcgtcgtgttgaacatatcagcaccgacggcttcctgctgccgaaccaagtgctgaaggagcgtggtctgatggggaaaaagggtttcccggaaagctacgatatgcaccgtctgatgaaatttgttaaagacctgaagagcggtgtgccgaacgttaccgcgccggtgtacagccacctgatctatgatgttattcctgacggcgataaaaccgtggttcagccggacatcctgattctggagggtctgaacgtgctgcaaagcggcatggactatccgcacgatccgcaccacgtgtttgttagcgacttcgtggattttagcatctacgttgacgcgccggaggatctgctgcagacctggtacattaaccgtttcctgaaactgcgtgagggtgcgttcaccgacccggatagctactttcacgggtatgcgaaactgaccaaggaagaggcgatcaaaaccgcgatgaccatttggaaggagggtaacagcgtgaacctgaagcaaaacattctgccgacccgtgaacgtgcgagcctgattctgaccaaaagtgcaaaccacatcgtggaggaagttcgtctgcgtaag

SEQ ID NO: 384 - protein, 326 aa, Artificial Sequence
  Engineered variant of Pantothenate Kinase from Escherichia coli
MHHHHHHGGSGSIKEQTEMTPYLQLDRNQWRAIRDSNPMTLSEDEIARLKGINEDLSLEEVAEVYLPLSRVLNFYVSSAERRQAQLEQFLGTNSQRIPYIISVAGSVAVGKSTFARVLQALLSRWPEHRRVEHISTDGFLLPNQVLKERGLMGKKGFPESYDMHRLMKFVKDLKSGVPNVTAPVYSHLIYDVIPDGDKTVVQPDILILEGLNVLQSGMDYPHDPHHVFVSDFVDFSIYVDAPEDLLQTWYINRFLKLREGAFTDPDSYFHGYAKLTKEEAIKTAMTIWKEGNSVNLKQNILPTRERASLILTKSANHIVEEVRLRK

SEQ ID NO: 385 - DNA, 978 bp, Artificial Sequence
  Engineered variant of Pantothenate Kinase from Escherichia coli
atgcaccatcatcatcatcatggcggtagcggcagcatcaaagagcgcaccgagatgactccgtacctgcaactggaccgtaaccaatgggcggcggtgcgtgatagtaacccgatgaccctgagcgaggacgaaatcgcgcgtctgaagggtattaacgaagatctgagcctggaggaagtggcggaagtctacctgccgctgagccgtgttctgaacttctatattagcagcaacctgcgtcgtcaggcgcagctggaacagtttctgggtaccaatggccagcgtatcccgtatatcattagcgttgcgggtagcgtggcggttggcaaaagcacctttgcgcgtgtgctgcaggcgctgctgagccgttggccggagcatcgtcgtgttgaacatatcagcaccgacggcttcctgcacccgaaccaagtgctgaaggagcgtggtctgatggggaaaaagggtttcccggaaagctacgatatgcaccgtctgatgaaatttgttaaagacctgaagagcggtgtgccggttgttaccgcgccggtgtacagccacctgatctatgatgttattccggacggcgataaaaccgtggttcagccggacatcctgattctggagggtctgaacgtgctgcaaagcggcatggactatccacacgatccgcaccacgtgtttgttagcgacttcgtggattttagcatctacgttgacgcgccggaggatctgctgcagacctggtacattaaccgtttcctgaaactgcgtgagggtgcgttcaccgacccggatagctactttcacgggtatgcgaaactgaccaaggaagaggcgatcgctaccgcgatgaccatttggaaggagatgaacagcgtgaacctgaagcaaaacattctgccgacccgtgaacgtgcgagtctgattttgaccaaaagtgcaaaccacatcgtggaggaagtacgtctgcgtaag

SEQ ID NO: 386 - protein, 326 aa, Artificial Sequence
  Engineered variant of Pantothenate Kinase from Escherichia coli
MHHHHHHGGSGSIKERTEMTPYLQLDRNQWAAVRDSNPMTLSEDEIARLKGINEDLSLEEVAEVYLPLSRVLNFYISSNLRRQAQLEQFLGTNGQRIPYIISVAGSVAVGKSTFARVLQALLSRWPEHRRVEHISTDGFLHPNQVLKERGLMGKKGFPESYDMHRLMKFVKDLKSGVPVVTAPVYSHLIYDVIPDGDKTVVQPDILILEGLNVLQSGMDYPHDPHHVFVSDFVDFSIYVDAPEDLLQTWYINRFLKLREGAFTDPDSYFHGYAKLTKEEAIATAMTIWKEMNSVNLKQNILPTRERASLILTKSANHIVEEVRLRK

SEQ ID NO: 387 - DNA, 978 bp, Artificial Sequence
  Engineered variant of Pantothenate Kinase from Escherichia coli
atgcaccatcatcatcatcatggcggtagcggcagcatcaaagagcagaccgagatgaccccgtacctgcaactggaccgtaaccaatgggcggcggtgcgtgatagtaacccgatgaccctgagcgaggacgaaatcgcgcgtctgaagggtattaacgaagatctgagcctggaggaagtggcggaagtctacctgccgctgagccgtgttctgaacttctatattagcagcaacctgcgtcgtcaggcgcagctggaacagtttctgggtaccaacggccagcgtatcccgtatatcattagcgttgcgggtagcgtggcggttggcaaaagcacctttgcgcgtgtgctgcaggctctgctgagccgttggccggagcatcgtcgtgttgaacatatcagcaccgacggcttcctgctgccgaaccaagtgctgaaggagcgtggtctgatggggaaaaagggtttcccggaaagctacgatatgcaccgtctgatgaaatttgttaaagacctgaagagcggtgtgccgaacgttaccgcgccggtgtacagccacctgatctatgatgttattccggacggcgataaaaccgtggttcagccggacatcctgattctggagggtctgaacgtgctgcaaagcggcatggactatccacacgatccgcaccacgtgtttgttagcgacttcgtggattttagcatctacgttgacgcgccggaggatctgctgcagacctggtacattaaccgtttcctgaaactgcgtgagggtgcgttcaccgacccggatagctactttcacgggtatgcgaaactgaccaaggaagaggcgatcaagaccgcgatgaccatttggaaggagatgaacagcgtgaacctgaagcaaaacattctgccgacccgtgaacgtgcgatgctgattttgaccaaaagtgcaaaccacatcgtggaggaagttcgtctgcgtaag

SEQ ID NO: 388 - protein, 326 aa, Artificial Sequence
  Engineered variant of Pantothenate Kinase from Escherichia coli
MHHHHHHGGSGSIKEQTEMTPYLQLDRNQWAAVRDSNPMTLSEDEIARLKGINEDLSLEEVAEVYLPLSRVLNFYISSNLRRQAQLEQFLGTNGQRIPYIISVAGSVAVGKSTFARVLQALLSRWPEHRRVEHISTDGFLLPNQVLKERGLMGKKGFPESYDMHRLMKFVKDLKSGVPNVTAPVYSHLIYDVIPDGDKTVVQPDILILEGLNVLQSGMDYPHDPHHVFVSDFVDFSIYVDAPEDLLQTWYINRFLKLREGAFTDPDSYFHGYAKLTKEEAIKTAMTIWKEMNSVNLKQNILPTRERAMLILTKSANHIVEEVRLRK

SEQ ID NO: 389 - DNA, 978 bp, Artificial Sequence
  Engineered variant of Pantothenate Kinase from Escherichia coli
atgcaccatcatcatcatcatggcggtagcggcagcatcaaagagcagaccgagatgaccccgtacctgcaactgacgcgtaaccaatggcgtgcggttcgtgacagtaacccgatgaccctgagcgaggacgaaatcgcgcgtctgaagggtattaacgaagatctgagcctggaggaagtggcggaagtctacctgccgctgagccgtgttctgaacttctatattagcagcaacctgcgtcgtcaggcgcagctggaacagtttctgggtaccaatggccagcgtatcccgtatatcattagcgttgcgggtagcgtggcggttggcaaaagcacctttgcgcgtgtgctgcagacgctgctgagccgttggccggagcatcgtcgtgttgaacatatcagcaccgacggcttcctgctgccgaaccaagtgctgaaggagcgtggtctgatggggaaaaagggtttcccggaaagctacgatatgcaccgtctgatgaaatttgttaaagacctgaagagcggtgtgccgaacgttaccgcgccggtgtacagccacctgatctatgatgttattccggacggcgataaaaccgtggttcagccggacatcctgattctggagggtctgaacgtgctgcaaagcggcatggactatccgcacgatccgcaccacgtgtttgttagcgacttcgtggattttagcatctacgttgacgcgccggaggatctgctgcagacctggtacattaaccgtttcctgaaactgcgtgagggtgcgttcaccgacccggatagctactttcacgggtatgcgaaactgaccaaggaagaggcgatcaaaaccgcgatgaccatttggaaggagatgaacagcgtgaacctgaagcaaaacattctgccgacccgtgaacgtgcgagcctgattttgaccaaaagtgcaaaccacatcgtggaggaagttcgtctgcgtaag

SEQ ID NO: 390 - protein, 326 aa, Artificial Sequence
  Engineered variant of Pantothenate Kinase from Escherichia coli
MHHHHHHGGSGSIKEQTEMTPYLQLTRNQWRAVRDSNPMTLSEDEIARLKGINEDLSLEEVAEVYLPLSRVLNFYISSNLRRQAQLEQFLGTNGQRIPYIISVAGSVAVGKSTFARVLQTLLSRWPEHRRVEHISTDGFLLPNQVLKERGLMGKKGFPESYDMHRLMKFVKDLKSGVPNVTAPVYSHLIYDVIPDGDKTVVQPDILILEGLNVLQSGMDYPHDPHHVFVSDFVDFSIYVDAPEDLLQTWYINRFLKLREGAFTDPDSYFHGYAKLTKEEAIKTAMTIWKEMNSVNLKQNILPTRERASLILTKSANHIVEEVRLRK

SEQ ID NO: 391 - DNA, 978 bp, Artificial Sequence
  Engineered variant of Pantothenate Kinase from Escherichia coli
atgcaccatcatcatcatcatggcggtagcggcagcatcaaagagcagaccgagatgaccccgtacctgcaactggaccgtaaccaatgggcggcggtgcgtgatagtaacccgatgaccctgagcgaggacgaaaaagcgcgtctgaagggtattaacgaagatctgagcctggaggaagtggcggaagtctacctgccgctgagccgtgttctgaacttctatattagcagcaacctgcgtcgtcaggcgcagctggaacagtttctgggtaccaatggccagcgtatcccgtatatcattagcgttgcgggtagcgtggcggttggcaaaagcacctttgcgcgtgtgctgcaggcgctgctgagccgttggccggagcatcgtcgtgttgaacatatcagcaccgacggcttcctgctgccgaaccaagtgctgaaggagcgtggtctgatggggaaaaagggtttcccggaaagctacgatatgcctcgtctgatgaaatttgttaaagacctgaagagcggtgtgccgaacgttaccgcgccggtgtacagccacctgatctatgatgttgtcccggacggcgataaaaccgtggttcagccggacatcctgattctggagggtctgaacgtgctgcaaagcggcatggactatccgcacgatccgcaccacgtgtttgttagcgacttcgtggattttagcatctacgttgacgcgccggaggatctgctgcagacctggtacattaaccgtttcctgaaactgcgtgagggtgcgttcaccgacccggatagctactttcacgggtatgcgaaactgaccaaggaagaggcgatcaaaaccgcgatgaccatttggaaggagatgaacagcgtgaacctgaagcaaaacattctgccgacccgtgaacgtgcgagcctgattctgaccaaaagtgcaaaccacatcgtggaggaagttcgtctgcgtaag

SEQ ID NO: 392 - protein, 326 aa, Artificial Sequence
  Engineered variant of Pantothenate Kinase from Escherichia coli
MHHHHHHGGSGSIKEQTEMTPYLQLDRNQWAAVRDSNPMTLSEDEKARLKGINEDLSLEEVAEVYLPLSRVLNFYISSNLRRQAQLEQFLGTNGQRIPYIISVAGSVAVGKSTFARVLQALLSRWPEHRRVEHISTDGFLLPNQVLKERGLMGKKGFPESYDMPRLMKFVKDLKSGVPNVTAPVYSHLIYDVVPDGDKTVVQPDILILEGLNVLQSGMDYPHDPHHVFVSDFVDFSIYVDAPEDLLQTWYINRFLKLREGAFTDPDSYFHGYAKLTKEEAIKTAMTIWKEMNSVNLKQNILPTRERASLILTKSANHIVEEVRLRK

SEQ ID NO: 393 - DNA, 978 bp, Artificial Sequence
  Engineered variant of Pantothenate Kinase from Escherichia coli
atgcaccatcatcatcatcatggcggtagcggcagcatcaaagagcagaccgagatgaccccgtacctgcaactggatcgtaaccaatgggccgcggttcgtgacagtaacccgatgaccctgagcgaggacgaaatcgcgcgtctgaagggtattaacgaagatctgagcctggaggaagtggcggaagtctacctgccgctgagccgtgttctgaacttctatgttagcagcgccgagcgtcgtcaggcgcagctggaacagtttctgggtaccaatggccagcgtatcccgtatatcattagcgttgcgggtagcgtggcggttggcaaaagcacctttgcgcgtgtgctgcagacgctgctgagccgttggccggagcatcgtcgtgttgaacatatcagcaccgacggcttcctgctgccgaaccaagtgctgaaggagcgtggtctgatggggaaaaagggtttcccggaaagctacgatatgcaccgtctgatgaaatttgttaaagacctgaagagcggtgtgccgaacgttaccgcgccggtgtacagccacctgatctatgatgttattccggacggcgataaaaccgtggttcagccggacatcctgattctggagggtctgaacgtgctgcaaagcggcatggactatccgcacgatccgcaccacgtgtttgttagcgacttcgtggattttagcatctacgttgacgcgccggaggatctgctgcagacctggtacattaaccgtttcctgaaactgcgtgagggtgcgttcaccgacccggatagctactttcacgggtatgcgaaactgaccaaggaagaggcgatcaaaaccgcgatgaccatttggaaggagatgaacagcgtgaacctgaagcaaaacattctgccgacccgtgaacgtgcgagcctgattctgaccaaaagtgcaaaccacatcgtggaggaagttcgtctgcgtaag

SEQ ID NO: 394 - protein, 326 aa, Artificial Sequence
  Engineered variant of Pantothenate Kinase from Escherichia coli
MHHHHHHGGSGSIKEQTEMTPYLQLDRNQWAAVRDSNPMTLSEDEIARLKGINEDLSLEEVAEVYLPLSRVLNFYVSSAERRQAQLEQFLGTNGQRIPYIISVAGSVAVGKSTFARVLQTLLSRWPEHRRVEHISTDGFLLPNQVLKERGLMGKKGFPESYDMHRLMKFVKDLKSGVPNVTAPVYSHLIYDVIPDGDKTVVQPDILILEGLNVLQSGMDYPHDPHHVFVSDFVDFSIYVDAPEDLLQTWYINRFLKLREGAFTDPDSYFHGYAKLTKEEAIKTAMTIWKEMNSVNLKQNILPTRERASLILTKSANHIVEEVRLRK

SEQ ID NO: 395 - DNA, 978 bp, Artificial Sequence
  Engineered variant of Pantothenate Kinase from Escherichia coli
atgcaccatcatcatcatcatggcggtagcggcagcatcaaagagcaggttgagatgaccccgtacctgcaactggaccgtaaccaatgggcggcggtgcgtgatagtaacccgatgaccctgagcgaggacgaaaaagcgcgtctgaagggtattaacgaagatctgagcctggaggaagtggcgctggtctacctgccgctgagccgtgttctgaacttctatattagcagcaacctgcgtcgtcaggcgcagctggaacagtttctgggtaccaatggccagcgtatcccgtatatcattagcgttgcgggtagcgtggcggttggcaaaagcacctttgcgcgtgtgctgcaggcgctgctgagccgttggccagagcatcgccgcgttgaacatatcagcaccgacggcttcctgctgccgaaccaagtgctgaaggagcgtggtctgatggggaaaaagggtttcccggaaagctacgatatgcctcgtctgatgaaatttgttaaagacctgaagagcggtgtgccgaacgttaccgcgccggtgtacagccacctgatctatgatgttattccggacggcgataaaaccgtggttcagccggacatcctgattctggagggtctgaacgtgctgcaaagcggcatggactatccgcacgatccgcaccacgtgtttgttagcgacttcgtggattttagcatctacgttgacgcgccggaggatctgctgcagacctggtacattaaccgtttcctgaaactgcgtgagggtgcgttcaccgacccggatagctactttcacgggtatgcgaaactgaccaaggaagaggcgatcaaaaccgcgatgaccatttggaaggagatgaacagcgtgaacctgaagcaaaacattctgccgacccgtgaacgtgcgagcctgattctgaccaaaagtgcaaaccacatcgtggaggaagttcgtctgcgtaag

SEQ ID NO: 396 - protein, 326 aa, Artificial Sequence
  Engineered variant of Pantothenate Kinase from Escherichia coli
MHHHHHHGGSGSIKEQVEMTPYLQLDRNQWAAVRDSNPMTLSEDEKARLKGINEDLSLEEVALVYLPLSRVLNFYISSNLRRQAQLEQFLGTNGQRIPYIISVAGSVAVGKSTFARVLQALLSRWPEHRRVEHISTDGFLLPNQVLKERGLMGKKGFPESYDMPRLMKFVKDLKSGVPNVTAPVYSHLIYDVIPDGDKTVVQPDILILEGLNVLQSGMDYPHDPHHVFVSDFVDFSIYVDAPEDLLQTWYINRFLKLREGAFTDPDSYFHGYAKLTKEEAIKTAMTIWKEMNSVNLKQNILPTRERASLILTKSANHIVEEVRLRK

SEQ ID NO: 397 - DNA, 978 bp, Artificial Sequence
  Engineered variant of Pantothenate Kinase from Escherichia coli
atgcaccatcatcatcatcatggcggtagcggcagcatcaaagagcagaccgagatgaccccgtacctgcaactggaccgtaaccaatgggcggcggtgcgtgatagtaacccgatgaccctgagcgaggacgaaatcgcgcgtctgaagggtattaacgaagatctgagcctggaggaagtggcggaagtctacctgccgctgagccgtgttctgaacctgtatatttcgagcaacctgcgtcgtcaggcgagtctggaacagtttctgggtaccaatggccagcgtatcccgtatatcattagcgttgcgggtagcgtggcggttggcaaaagcacctttgcgcgtgtgctgcaggcgctgctgagccgttggccggagcatcgtcgtgttgaacatatcagcaccgacggcttcctgctgccgaaccaaatcctgaaggagcgtggtctgatggggaaaaagggtttcccggaaagctacgatatgcaccgtctgatgaaatttgttaaagacctgaagagcggtgtgccgaacgttaccgcgccggtgtacagccacctgatctatgatgttattccggacggcgataaaaccgtggttcagccggacatcctgattctggagggtctgaacgtgctgcaaagcggcatggactatccgcacgatccgcatcacgtgtttgttagcgacttcgtggattttagcatctacgttgacgcgccggaggatctgctgcagacctggtacattaaccgtttcctgaaactgcgtgagggtgcgttcaccgacccggatagctactttcacgggtatgcgaagctgaccaaggaagaggcgatcaaaaccgcgatgaccatttggaaggagatgaacagcgtgaacctgaagcaaaacattctgccgacccgtgaacgtgcgagcctgattctgaccaaaagtgcaaaccacatcgtggaggaagttcgtctgcgtaag

SEQ ID NO: 398 - protein, 326 aa, Artificial Sequence
  Engineered variant of Pantothenate Kinase from Escherichia coli
MHHHHHHGGSGSIKEQTEMTPYLQLDRNQWAAVRDSNPMTLSEDEIARLKGINEDLSLEEVAEVYLPLSRVLNLYISSNLRRQASLEQFLGTNGQRIPYIISVAGSVAVGKSTFARVLQALLSRWPEHRRVEHISTDGFLLPNQILKERGLMGKKGFPESYDMHRLMKFVKDLKSGVPNVTAPVYSHLIYDVIPDGDKTVVQPDILILEGLNVLQSGMDYPHDPHHVFVSDFVDFSIYVDAPEDLLQTWYINRFLKLREGAFTDPDSYFHGYAKLTKEEAIKTAMTIWKEMNSVNLKQNILPTRERASLILTKSANHIVEEVRLRK

SEQ ID NO: 399 - DNA, 978 bp, Artificial Sequence
  Engineered variant of Pantothenate Kinase from Escherichia coli
atgcaccatcatcatcatcatggcggtagcggcagcatcaaagagcagaccgagatgaccccgtacctgcaactggatcgtaaccaatggcgtgcggttcgtgacagtaacccgatgaccctgagcgaggacgaaatcgcgcgtctgaagggtattaacgaagatctgagcctggaggaagtggcggaagtctacctgccgctgagccgtgttctgaacttctatgttagcagcgccctgcgtcgtcaggcgcagctggaacagtttctgggtaccaatggccagcgtatcccgtatatcattagcgttgcgggtagcgtggcggttggcaaaagcacctttgcgcgtgtgctgcaggcgctgctgagccgttggccggagcatcgtcgtgttgaacatatcagcaccgacggcttcctgctgccgaaccaagtgctgaaggagcgtggtctgatggggaaaaagggtttcccggaaagctacgatatgcaccgtctgatgaaatttgttaaagacctgaagagcggtgtgccgaacgttaccgcaccggtgtacagccacctgatctatgatgttattccggacggcgataaaaccgtggttcagccggacatcctgattctggagggtctgaacgtgctgcaaagcggcatggactatccgcacgatccgcaccacgtgtttgttagcgacttcgtggattttagcatctacgttgacgcgccggaggatctgctgcagacctggtacattaaccgtttcctgaaactgcgtgagggtgcgttcaccgacccggatagctactttcacgggtatgcgaaactgaccaaggaagaggcgatcaaaaccgcgatgaccatttggaaggagatgaacctggtgaacctgaagcaaaacattctgccgacccgtgaacgtgcgagcctgattctgaccaaaagtgcaaaccacatcgtggaggaagttcgtctgcgtaag

SEQ ID NO: 400 - protein, 326 aa, Artificial Sequence
  Engineered variant of Pantothenate Kinase from Escherichia coli
MHHHHHHGGSGSIKEQTEMTPYLQLDRNQWRAVRDSNPMTLSEDEIARLKGINEDLSLEEVAEVYLPLSRVLNFYVSSALRRQAQLEQFLGTNGQRIPYIISVAGSVAVGKSTFARVLQALLSRWPEHRRVEHISTDGFLLPNQVLKERGLMGKKGFPESYDMHRLMKFVKDLKSGVPNVTAPVYSHLIYDVIPDGDKTVVQPDILILEGLNVLQSGMDYPHDPHHVFVSDFVDFSIYVDAPEDLLQTWYINRFLKLREGAFTDPDSYFHGYAKLTKEEAIKTAMTIWKEMNLVNLKQNILPTRERASLILTKSANHIVEEVRLRK

SEQ ID NO: 401 - DNA, 978 bp, Artificial Sequence
  Engineered variant of Pantothenate Kinase from Escherichia coli
atgcaccatcatcatcatcatggcggtagcggcagcatcaaagagcagaccgagatgaccccgtacctgcaactggaccgtaaccaatgggcggcggtgcgtgatagtaacccgatgaccctgagcgaggacgaaaaagcgcgtctgaagggtattaacgaagatctgagcctggaggaagtggcggaagtctacctgccgctgagccgtgttctgaacttctatattagcagcaacctgcgtcgtcaggcgcagctggaacagtttctgggtaccaatggccagcgtatcccgtatatcattagcgttgcgggtagcgtggcggttggcaaaagcacctttgcgcgtgtgctgcaggcgctgctgagccgttggccagagcatggccgcgttgaacatatcagcaccgacggcttcctgctgccgaaccaagtgctgaaggagcgtggtctgatggggaaaaagggtttcccggaaagctacgatatgcaccgtctgatgaaatttgttaaagacctgaagagcggtgtgccgaacgttaccgcgccggtgtacagccacctgatctatgatgttattccggacggcgataaaaccgtggttcagccggacatcctgattctggagggtctgaacgtgctgcaaagcggcatggactatccgcacgatccgcaccacgtgtttgttagcgacttcgtggattttagcatctacgttgacgcgccggaggatctgctgcagacctggtacattaaccgtttcctgaaactgcgtgagggtgcgttcaccgacccggatagctactttcacgggtatgcgaaactgaccaaggaagaggcgatcaaaaccgcgatgaccatttggaaggagatgaacagcgtgaacctgaagcaaaacattctgccgacccgtgaacgtgcgagcctgattttgaccaaaagtgcaaaccacatcgtggaggaagttcgtctgcgtaag

SEQ ID NO: 402 - protein, 326 aa, Artificial Sequence
  Engineered variant of Pantothenate Kinase from Escherichia coli
MHHHHHHGGSGSIKEQTEMTPYLQLDRNQWAAVRDSNPMTLSEDEKARLKGINEDLSLEEVAEVYLPLSRVLNFYISSNLRRQAQLEQFLGTNGQRIPYIISVAGSVAVGKSTFARVLQALLSRWPEHGRVEHISTDGFLLPNQVLKERGLMGKKGFPESYDMHRLMKFVKDLKSGVPNVTAPVYSHLIYDVIPDGDKTVVQPDILILEGLNVLQSGMDYPHDPHHVFVSDFVDFSIYVDAPEDLLQTWYINRFLKLREGAFTDPDSYFHGYAKLTKEEAIKTAMTIWKEMNSVNLKQNILPTRERASLILTKSANHIVEEVRLRK

SEQ ID NO: 403 - DNA, 978 bp, Artificial Sequence
  Engineered variant of Pantothenate Kinase from Escherichia coli
atgcaccatcatcatcatcatggcggtagcggcagcatcaaagagcagaccgagatgaccccgtacctgcaactgacgcgtaaccaatgggccgcgattcgtagtagtaacccgatgaccctgagcgaggacgaaatcgcgcgtctgaagggtattaacgaagatctgagcctggaggaagtggcggaagtctacctgccgctgagccgtgttctgaacttctatattagcagcaacctgcgtcgtcaggcgcagctggaacagtttctgggtaccaatggccagcgtatcccgtatatcattagcgttgcgggtagcgtggcggttggcaaaagcacctttgcgcgtgtgctgcaggcgctgctgagccgttggtcggagcatcgtcgtgttgaacatatcagcaccgacggcttcctgctgccgaaccaagtgctgaaggagcgtggtctgatggggaaaaagggtttcccggaaagctacgatatgcaccgtctgatgaaatttgttaaagacctgaagagcggtgtgccgaacgttaccgcgccggtgtacagccacctgatctatgatgttattccggacggcgataaaaccgtggttcagccggacatcctgattctggagggtctgaacgtgctgcaaagcggcatggactatcctggggatccgcaccacgtatttgttagcgacttcgtggattttagcatctacgttgacgcgccggaggatctgctgcagacctggtacattaaccgtttcctgaaactgcgtgagggtgcgttcaccgacccggatagctactttcacgggtatgcgaaactgaccaaggaagaggcgatcaaaaccgcgatgaccatttggaaggagggtaacagcgtgaacctgaagcaaaacattctgccgacccgtgaacgtgcgagcctgattttgaccaaaagtgcaaaccacatcgtggaggaagttcgtctgcgtaag

SEQ ID NO: 404 - protein, 326 aa, Artificial Sequence
  Engineered variant of Pantothenate Kinase from Escherichia coli
MHHHHHHGGSGSIKEQTEMTPYLQLTRNQWAAIRSSNPMTLSEDEIARLKGINEDLSLEEVAEVYLPLSRVLNFYISSNLRRQAQLEQFLGTNGQRIPYIISVAGSVAVGKSTFARVLQALLSRWSEHRRVEHISTDGFLLPNQVLKERGLMGKKGFPESYDMHRLMKFVKDLKSGVPNVTAPVYSHLIYDVIPDGDKTVVQPDILILEGLNVLQSGMDYPGDPHHVFVSDFVDFSIYVDAPEDLLQTWYINRFLKLREGAFTDPDSYFHGYAKLTKEEAIKTAMTIWKEGNSVNLKQNILPTRERASLILTKSANHIVEEVRLRK

SEQ ID NO: 405 - DNA, 978 bp, Artificial Sequence
  Engineered variant of Pantothenate Kinase from Escherichia coli
atgcaccatcatcatcatcatggcggtagcggcagcatcaaagagcagaccgagatgaccccgtacctgcaactggaccgtaaccaatgggcggcggtgcgtcgcagtaacccgatgaccctgagcgaggacgaaatcgcgcgtctgaagggtattaacgaagatctgagcctggaggaagtggcggaagtctacctgccgctgagccgtgttctgaacctgtatattctgagcaacctgcgtcgtcaggcgcagctggaacagtttctgggtaccaatggccagcgtatcccgtatatcattagcgttgcgggtagcgtggcggttggcaaaagcacctttgcgcgtgtgctgcaggcgctgctgagccgttggccggagcatcgtcgtgttgaacatatcagcaccgacggcttcctgctgccgaaccaagtgctgaaggagcgtggtctgatggggaaaaagggtttcccggaaagctacgatatgcaccgtctgatgaaatttgttaaagacctgaagagcggtgtgccgaacgttaccgcgccggtgtacagccacctgatctatgatgttattccggatggcgttaaaaccgtggttcagccggacatcctgattctggagggtctgaacgtgctgcaaagcggcatggactatccgcacgatccgtatcacgtgtttgttagcgacttcgtggattttagcatctacgttgacgcgccggaggatctgctgcagacctggtacattaaccgtttcctgaaactgcgtgagggtgcgttcaccgacccggatagctactttcacgggtatgcgaagctgaccaaggaagaggcgatcaaaaccgcgatgaccatttggaaggagatgaacagcgtgaacctgaagcaaaacattctgccgacccgtgaacgtgcgagtctgattttgaccaaaagtgcaaaccacatcgtggaggaagttcgtctgcgtaag

SEQ ID NO: 406 - protein, 326 aa, Artificial Sequence
  Engineered variant of Pantothenate Kinase from Escherichia coli
MHHHHHHGGSGSIKEQTEMTPYLQLDRNQWAAVRRSNPMTLSEDEIARLKGINEDLSLEEVAEVYLPLSRVLNLYILSNLRRQAQLEQFLGTNGQRIPYIISVAGSVAVGKSTFARVLQALLSRWPEHRRVEHISTDGFLLPNQVLKERGLMGKKGFPESYDMHRLMKFVKDLKSGVPNVTAPVYSHLIYDVIPDGVKTVVQPDILILEGLNVLQSGMDYPHDPYHVFVSDFVDFSIYVDAPEDLLQTWYINRFLKLREGAFTDPDSYFHGYAKLTKEEAIKTAMTIWKEMNSVNLKQNILPTRERASLILTKSANHIVEEVRLRK

SEQ ID NO: 407 - DNA, 978 bp, Artificial Sequence
  Engineered variant of Pantothenate Kinase from Escherichia coli
atgcaccatcatcatcatcatggcggtagcggcagcatcaaagagcagaccgagatgaccccgtacctgcaactggaccgtaaccaatgggcggcggtggccgatagtaacccgatgaccctgagcgaggacgaaaaagcgcgtctgaagggtattaacgaagatctgagcctggaggaagtggcgctggtctacctgccgctgagccgtgttctgaacttctatattagcagcaacctgcgtcgtcaggcgcagctggaacagtttctgggtaccaatggccagcgtatcccgtatatcattagcgttgcgggtagcgtggcggttggcaaaagcacctttgcgcgtgtgctgcaggcgctgctgagccgttggccggagcatcgtcgtgttgaacatatcagcaccgacggcttcctgctgccgaaccaagtgctgaaggagcgtggtctgatggggaaaaagggtttcccggaaagctacgatatgcaccgtctgatgaaatttgttaaagacctgaagagcggtgtgccgaacgttaccgcgccggtgtacagccacctgatctatgatgttattccggacggcgataaaaccgtggttcagccggacatcctgattctggagggtctgaacgtgctgcaaagcggcatggactatccgcacgatccgcaccacgtgtttgttagcgacttcgtggattttagcatctacgttgacgcgccggaggatctgctgcagacctggtacattaaccgtttcctgaaactgcgtgagggtgcgttcaccgacccggatagctactttcacgggtatgcgaaactgaccaaggaagaggcgatcaaaaccgcgatgaccatttggaaggagatgaacagcgtgaacctgaagcaaaacattctgccgacccgtgaacgtgcgagcctgattctgaccaaaagtgcaaaccacatcgtggaggaagttcgtctgcgtaag

SEQ ID NO: 408 - protein, 326 aa, Artificial Sequence
  Engineered variant of Pantothenate Kinase from Escherichia coli
MHHHHHHGGSGSIKEQTEMTPYLQLDRNQWAAVADSNPMTLSEDEKARLKGINEDLSLEEVALVYLPLSRVLNFYISSNLRRQAQLEQFLGTNGQRIPYIISVAGSVAVGKSTFARVLQALLSRWPEHRRVEHISTDGFLLPNQVLKERGLMGKKGFPESYDMHRLMKFVKDLKSGVPNVTAPVYSHLIYDVIPDGDKTVVQPDILILEGLNVLQSGMDYPHDPHHVFVSDFVDFSIYVDAPEDLLQTWYINRFLKLREGAFTDPDSYFHGYAKLTKEEAIKTAMTIWKEMNSVNLKQNILPTRERASLILTKSANHIVEEVRLRK

SEQ ID NO: 409 - DNA, 978 bp, Artificial Sequence
  Engineered variant of Pantothenate Kinase from Escherichia coli
atgcaccatcatcatcatcatggcggtagcggcagcatcaaagagcagaccgagatgaccccgtacctgcaactggaccgtaaccaatgggcggcggtgcgtgatagtaacccgatgaccctgagcgaggacgaaatcgcgcgtctgaagggtattaacgaagatctgagcctggaggaagtggcggaagtctacctgccgctgagccgtgttctgaacttctatattagcagcaacctgcgtcgtcaggcgcagctggaacagtttctgggtaccaatggccagcgtatcccgtatatcattagcgttgcgggtagcgtggcggttggcaaaagcacctttgcgcgtgtgctgcaggcgctgctgagccgttgggtagagagcggccgcgttgaacatatcagcaccgacggcttcctgctgccgaaccaagtgctgaaggagcgtggtctgatggggaaaaagggtttcccggaaagctacgatatgcatcgtctgatgaaatttgttaaagacctgaagagcggtgtgccgaacgttaccgcgccggtgtacagccacctgatctatgatgttgtcccggacggcgataaaaccgtggttcagccggacatcctgattctggagggtctgaacgtgctgcaaagcggcatggactatccgcacgatccgcaccacgtgtttgttagcgacttcgtggattttagcatctacgttgacgcgccggaggatctgctgcagacctggtacattaaccgtttcctgaaactgcgtgagggtgcgttcaccgacccggatagctactttcacgggtatgcgaaactgaccaaggaagaggcgatcaaaaccgcgatgaccatttggaaggagatgaacagcgtgaacctgaagcaaaacattctgccgacccgtgaacgtgcgagcctgattctgaccaaaagtgcaaaccacatcgtggaggaagttcgtctgcgtaag

SEQ ID NO: 410 - protein, 326 aa, Artificial Sequence
  Engineered variant of Pantothenate Kinase from Escherichia coli
MHHHHHHGGSGSIKEQTEMTPYLQLDRNQWAAVRDSNPMTLSEDEIARLKGINEDLSLEEVAEVYLPLSRVLNFYISSNLRRQAQLEQFLGTNGQRIPYIISVAGSVAVGKSTFARVLQALLSRWVESGRVEHISTDGFLLPNQVLKERGLMGKKGFPESYDMHRLMKFVKDLKSGVPNVTAPVYSHLIYDVVPDGDKTVVQPDILILEGLNVLQSGMDYPHDPHHVFVSDFVDFSIYVDAPEDLLQTWYINRFLKLREGAFTDPDSYFHGYAKLTKEEAIKTAMTIWKEMNSVNLKQNILPTRERASLILTKSANHIVEEVRLRK

SEQ ID NO: 411 - DNA, 978 bp, Artificial Sequence
  Engineered variant of Pantothenate Kinase from Escherichia coli
atgcaccatcatcatcatcatggcggtagcggcagcatcaaagagcaggttgagatgaccccgtacctgcaactggaccgtaaccaatgggcggcggtggccgatagtaacccgatgaccctgagcgaggacgaaaaagcgcgtctgaagggtattaacgaagatctgagcctggaggaagtggcggaagtctacctgccgctgagccgtgttctgaacttctatattagcagcaacctgcgtcgtcaggcgcagctggaacagtttctgggtaccaatggccagcgtatcccgtatatcattagcgttgcgggtagcgtggcggttggcaaaagcacctttgcgcgtgtgctgcaggcgctgctgagccgttggccggagcatcgtcgtgttgaacatatcagcaccgacggcttcctgctgccgaaccaagtgctgaaggagcgtggtctgatggggaaaaagggtttcccggaaagctacgatatgcaccgtctgatgaaatttgttaaagacctgaagagcggtgtgccgaacgttaccgcgccggtgtacagccacctgatctatgatgttatcccggacggcgataaaaccgtggttcagccggacatcctgattctggagggtctgaacgtgctgcaaagcggcatggactatccgcacgatccgcaccacgtgtttgttagcgacttcgtggattttagcatctacgttgacgcgccggaggatctgctgcagacctggtacattaaccgtttcctgaaactgcgtgagggtgcgttcaccgacccggatagctactttcacgggtatgcgaaactgaccaaggaagaggcgatcaaaaccgcgatgaccatttggaaggagatgaacagcgtgaacctgaagcaaaacattctgccgacccgtgaacgtgcgagcctgattttgaccaaaagtgcaaaccacatcgtggaggaagttcgtctgcgtaag

SEQ ID NO: 412 - protein, 326 aa, Artificial Sequence
  Engineered variant of Pantothenate Kinase from Escherichia coli
MHHHHHHGGSGSIKEQVEMTPYLQLDRNQWAAVADSNPMTLSEDEKARLKGINEDLSLEEVAEVYLPLSRVLNFYISSNLRRQAQLEQFLGTNGQRIPYIISVAGSVAVGKSTFARVLQALLSRWPEHRRVEHISTDGFLLPNQVLKERGLMGKKGFPESYDMHRLMKFVKDLKSGVPNVTAPVYSHLIYDVIPDGDKTVVQPDILILEGLNVLQSGMDYPHDPHHVFVSDFVDFSIYVDAPEDLLQTWYINRFLKLREGAFTDPDSYFHGYAKLTKEEAIKTAMTIWKEMNSVNLKQNILPTRERASLILTKSANHIVEEVRLRK

SEQ ID NO: 413 - DNA, 978 bp, Artificial Sequence
  Engineered variant of Pantothenate Kinase from Escherichia coli
atgcaccatcatcatcatcatggcggtagcggcagcatcaaagagcagaccgagatgaccccgtacctgcaactggatcgtaaccaatggcgtgcgattcgtagtagtaacccgatgaccctgagcgaggacgaaatcgcgcgtctgaagggtattaacgaagatctgagcctggaggaagtggcggaagtctacctgccgctgagccgtgttctgaacttctatgttagcagcgccctgcgtcgtcaggcgcagctggaacagtttctgtgtaccaatggtcagcgtatcccgtatatcattagcgttgcgggtagcgtggcggttggcaaaagcacctttgcgcgtgtgctgcaggcgctgctgagccgttggccggagcatcgtcgtgttgaacatatcagcaccgacggcttcctgctgccgaaccaagtgctgaaggagcgtggtctgatggggaaaaagggtttcccggaaagctacgatatgcaccgtctgatgaaatttgttaaagacctgaagagcggtgtgccgaacgttaccgcgccggtgtacagccacctgatctatgatgttattccggacggcgataaaaccgtggttcagccggacatcctgattctggagggtctgaacgtgctgcaaagcggcatggactatccgcacgatccgcaccacgtgtttgttagcgacttcgtggattttagcatctacgttgacgcgccggaggatctgctgcagacctggtacattaaccgtttcctgaaactgcgtgagggtgcgttcaccgacccggatagctactttcacgggtatgcgaaactgaccaaggaagaggcgatcaaaaccgcgatgaccatttggaaggagggtaacagcgtgaacctgaagcaaaacattctgccgacccgtgaacgtgcgagcctgattctgaccaaaagtgcaaaccacatcgtggaggaagttcgtctgcgtaag

SEQ ID NO: 414 - protein, 326 aa, Artificial Sequence
  Engineered variant of Pantothenate Kinase from Escherichia coli
MHHHHHHGGSGSIKEQTEMTPYLQLDRNQWRAIRSSNPMTLSEDEIARLKGINEDLSLEEVAEVYLPLSRVLNFYVSSALRRQAQLEQFLCTNGQRIPYIISVAGSVAVGKSTFARVLQALLSRWPEHRRVEHISTDGFLLPNQVLKERGLMGKKGFPESYDMHRLMKFVKDLKSGVPNVTAPVYSHLIYDVIPDGDKTVVQPDILILEGLNVLQSGMDYPHDPHHVFVSDFVDFSIYVDAPEDLLQTWYINRFLKLREGAFTDPDSYFHGYAKLTKEEAIKTAMTIWKEGNSVNLKQNILPTRERASLILTKSANHIVEEVRLRK

SEQ ID NO: 415 - DNA, 978 bp, Artificial Sequence
  Engineered variant of Pantothenate Kinase from Escherichia coli
atgcaccatcatcatcatcatggcggtagcggcagcatcaaagagcagaccgagatgaccccgtacctgcaactggaccgtaaccaatgggcggcggtgcgtgatagtaacccgatgaccctgagcgaggacgaaatcgcgcgtctgaagggtattaacgaagatctgagcctggaggaagtggcgctggtctacctgccgctgagccgtgttctgaacttctatattagcagcaacctgcgtcgtcaggcgcagctggaacagtttctgggtaccaatggccagcgtatcccgtatatcattagcgttgcgggtagcgtggcggttggcaaaagcacctttgcgcgtgtgctgcaggcgctgctgagccgttggccggagcatcgtcgtgttgaacatatcagcaccgacggcttcctgctgccgaaccaagtgctgaaggagcgtggtctgatggggaaaaagggtttcccggaaagctacgatatgcatcgtctgatgaaatttgttaaagacctgaagagcggtgtgccgaacgttaccgcgccggtgtacagccacctgatctatgatgttgtcccggacggcgataaaaccgtggttcagccggacatcctgattctggagggtctgaacgtgctgcaaagcggcatggactatccgcacgatccgcaccacgtgtttgttagcgacttcgtggattttagcatctacgttgacgcgccggaggatctgctgcagacctggtacattaaccgtttcctgaaactgcgtgagggtgcgttcaccgacccggatagctactttcacgggtatgcgaaactgaccaaggaagaggcgatcaaaaccgcgatgaccatttggaaggagatgaacagcgtgaacctgaagcaaaacattctgccgacccgtgaacgtgcgagcctgattctgaccaaaagtgcaaaccacatcgtggaggaagttcgtctgcgtaag

SEQ ID NO: 416 - protein, 326 aa, Artificial Sequence
  Engineered variant of Pantothenate Kinase from Escherichia coli
MHHHHHHGGSGSIKEQTEMTPYLQLDRNQWAAVRDSNPMTLSEDEIARLKGINEDLSLEEVALVYLPLSRVLNFYISSNLRRQAQLEQFLGTNGQRIPYIISVAGSVAVGKSTFARVLQALLSRWPEHRRVEHISTDGFLLPNQVLKERGLMGKKGFPESYDMHRLMKFVKDLKSGVPNVTAPVYSHLIYDVVPDGDKTVVQPDILILEGLNVLQSGMDYPHDPHHVFVSDFVDFSIYVDAPEDLLQTWYINRFLKLREGAFTDPDSYFHGYAKLTKEEAIKTAMTIWKEMNSVNLKQNILPTRERASLILTKSANHIVEEVRLRK

SEQ ID NO: 417 - DNA, 978 bp, Artificial Sequence
  Engineered variant of Pantothenate Kinase from Escherichia coli
atgcaccatcatcatcatcatggcggtagcggcagcatcaaagagcagaccgagatgaccccgtacctgcaactggatcgtaaccaatgggccgcgattcgtagtagtaacccgatgaccctgagcgaggacgaaatcgcgcgtctgaagggtattaacgaagatctgagcctggaggaagtggcggaagtctacctgccgctgagccgtgttctgaacttctatattagcagcaacctgcgtcgtcaggcgcagctggaacagtttctgggtaccaatggccagcgtatcccgtatatcattagcgttgcgggtagcgtggcggttggcaaaagcacctttgcgcgtgtgctgcaggcgctgctgagccgttggccggagcatcgtcgtgttgaacatatcagcaccgacggcttcctgctgccgaaccaagtgctgaaggagcgtggtctgatggggaaaaagggtttcccggaaagctacgatatgcaccgtctgatgaaatttgttaaagacctgaagagcggtgtgccgaacgttaccgcgccggtgtacagccacctgatctatgatgttattcctgacggcgataaaaccgtggttcagccggacatcctgattctggagggtctgaacgtgctgcaaagcggcatggactatgagggggatccgcaccacgtatttgttagcgacttcgtggattttagcatctacgttgacgcgccggaggatctgctgcagacctggtacattaaccgtttcctgaaactgcgtgagggtgcgttcaccgacccggatagctactttcacgggtatgcgaaactgaccaaggaagaggcgatcaaaaccgcgatgaccatttggaaggagatgaacagcgtgaacctgaagcaaaacattctgccgacccgtgaacgtgcgagcctgattttgaccaaaagtgcaaaccacatcgtggaggaagttcgtctgcgtaag

SEQ ID NO: 418 - protein, 326 aa, Artificial Sequence
  Engineered variant of Pantothenate Kinase from Escherichia coli
MHHHHHHGGSGSIKEQTEMTPYLQLDRNQWAAIRSSNPMTLSEDEIARLKGINEDLSLEEVAEVYLPLSRVLNFYISSNLRRQAQLEQFLGTNGQRIPYIISVAGSVAVGKSTFARVLQALLSRWPEHRRVEHISTDGFLLPNQVLKERGLMGKKGFPESYDMHRLMKFVKDLKSGVPNVTAPVYSHLIYDVIPDGDKTVVQPDILILEGLNVLQSGMDYEGDPHHVFVSDFVDFSIYVDAPEDLLQTWYINRFLKLREGAFTDPDSYFHGYAKLTKEEAIKTAMTIWKEMNSVNLKQNILPTRERASLILTKSANHIVEEVRLRK

SEQ ID NO: 419 - DNA, 978 bp, Artificial Sequence
  Engineered variant of Pantothenate Kinase from Escherichia coli
atgcaccatcatcatcatcatggcggtagcggcagcatcaaagagcagaccgagatgaccccgtacctgcaactggaccgtaaccaatgggcggcggtgcgtcgcagtaacccgatgaccctgagcgaggacgaaatcgcgcgtctgaagggtattaacgaagatctgagcctggaggaagtggcggaagtctacctgccgctgagccgtgttctgaacttctatattagcagcaacctgcgtcgtcaggcgagtctggaacagtttctgggtaccaatggccagcgtatcccgtatatcattagcgttgcgggtagcgtggcggttggcaaaagcacctttgcgcgtgtgctgcaggcgctgctgagccgttggccggagcatcgtcgtgttgaacatatcagcaccgacggcttcctgctgccgaaccaagtgctgaaggagcgtggtctgatggggaaaaagggtttcccggaaagctacgatatgcaccgtctgatgaaatttgttaaagacctgaagagcggtgtgccgaacgttaccgcgccggtgtacagccacctgatctatgatgttattccggacggcgataaaaccgtggttcagccggacatcctgattctggagggtctgaacgtgctgcaaagcggctgcgactatccgcacgatccgcaccacgtgtttgttagcgacttcgtggattttagcatctacgttgacgcgccggaggatctgctgcagacctggtacattaaccgtttcctgaaactgcgtgagggtgcgttcaccgacccggatagctactttcacgggtatgcggcactgaccaaggaagaggcgatcaaaaccgcgatgaccatttggaaggagatgaacagcgtgaacctgaagcaaaacattctgccgacccgtgaacgtgcgagcctgattctgaccaaaagtgcaaaccacatcgtggaggaagttcgtctgcgtaag

SEQ ID NO: 420 - protein, 326 aa, Artificial Sequence
  Engineered variant of Pantothenate Kinase from Escherichia coli
MHHHHHHGGSGSIKEQTEMTPYLQLDRNQWAAVRRSNPMTLSEDEIARLKGINEDLSLEEVAEVYLPLSRVLNFYISSNLRRQASLEQFLGTNGQRIPYIISVAGSVAVGKSTFARVLQALLSRWPEHRRVEHISTDGFLLPNQVLKERGLMGKKGFPESYDMHRLMKFVKDLKSGVPNVTAPVYSHLIYDVIPDGDKTVVQPDILILEGLNVLQSGCDYPHDPHHVFVSDFVDFSIYVDAPEDLLQTWYINRFLKLREGAFTDPDSYFHGYAALTKEEAIKTAMTIWKEMNSVNLKQNILPTRERASLILTKSANHIVEEVRLRK

SEQ ID NO: 421 - DNA, 978 bp, Artificial Sequence
  Engineered variant of Pantothenate Kinase from Escherichia coli
atgcaccatcatcatcatcatggcggtagcggcagcatcaaagagcagaccgagatgaccccgtacctgcaactgacgcgtaaccaatgggccgcggttcgtagtagtaacccgatgaccctgagcgaggacgaaatcgcgcgtctgaagggtattaacgaagatctgagcctggaggaagtggcggaagtctacctgccgctgagccgtgttctgaacttctatattagcagcaacctgcgtcgtcaggcgcagctggaacagtttctgggtaccaatggtcagcgtatcccgtatatcattagcgttgcgggtagcgtggcggttggcaaaagcacctttgcgcgtgtgctgcagacgctgctgagccgttggccggagcatcgtcgtgttgaacatatcagcaccgacggcttcctgctgccgaaccaagtgctgaaggagcgtggtctgatggggaaaaagggtttcccggaaagctacgatatgcaccgtctgatgaaatttgttaaagacctgaagagcggtgtgccgaacgttaccgcgccggtgtacagccacctgatctatgatgttattccggacggcgataaaaccgtggttcagccggacatcctgattctggagggtctgaacgtgctgcaaagcggcatggactatcctggggatccgcaccacacttttgttagcgacttcgtggattttagcatctacgttgacgcgccggaggatctgctgcagacctggtacattaaccgtttcctgaaactgcgtgagggtgcgttcaccgacccggatagctactttcacgggtatgcgaaactgaccaaggaagaggcgatcaaaaccgcgatgaccatttggaaggagatgaacctggtgaacctgaagcaaaacattctgccgacccgtgaacgtgcgagcctgattctgaccaaaagtgcaaaccacatcgtggaggaagttcgtctgcgtaag

SEQ ID NO: 422 - protein, 326 aa, Artificial Sequence
  Engineered variant of Pantothenate Kinase from Escherichia coli
MHHHHHHGGSGSIKEQTEMTPYLQLTRNQWAAVRSSNPMTLSEDEIARLKGINEDLSLEEVAEVYLPLSRVLNFYISSNLRRQAQLEQFLGTNGQRIPYIISVAGSVAVGKSTFARVLQTLLSRWPEHRRVEHISTDGFLLPNQVLKERGLMGKKGFPESYDMHRLMKFVKDLKSGVPNVTAPVYSHLIYDVIPDGDKTVVQPDILILEGLNVLQSGMDYPGDPHHTFVSDFVDFSIYVDAPEDLLQTWYINRFLKLREGAFTDPDSYFHGYAKLTKEEAIKTAMTIWKEMNLVNLKQNILPTRERASLILTKSANHIVEEVRLRK

SEQ ID NO: 423 - DNA, 978 bp, Artificial Sequence
  Engineered variant of Pantothenate Kinase from Escherichia coli
atgcaccatcatcatcatcatggcggtagcggcagcatcaaagagcagaccgagatgaccccgtacctgcaactggaccgtaaccaatgggccgcggttcgtagtagtaacccgatgaccctgagcgaggacgaaatcgcgcgtctgaagggtattaacgaagatctgagcctggaggaagtggcggaagtctacctgccgctgagccgtgttctgaacttctatgttagcagcaacctgcgtcgtcaggcgcagctggaacagtttctgggtaccaatggccagcgtatcccgtatatcattagcgttgcgggtagcgtggcggttggcaaaagcacctttgcgcgtgtgctgcaggcgctgctgagccgttggccggagcatcgtcgtgttgaacatatcagcaccgacggcttcctgctgccgaaccaagtgctgaaggagcgtggtctgatggggaaaaagggtttcccggaaagctacgatatgcaccgtctgatgaaatttgttaaagacctgaagagcggtgtgccgaacgttaccgcgccggtgtacagccacctgatctatgatgttattcctgacggcgataaaaccgtggttcagccggacatcctgattctggagggtctgaacgtgctgcaaagcggcatggactatccgcacgatccgcaccacgtgtttgttagcgacttcgtggattttagcatctacgttgacgcgccggaggatctgctgcagacctggtacattaaccgtttcctgaaactgcgtgagggtgcgttcaccgacccggatagctactttcacgggtatgcgaaactgaccaaggaagaggcgatcaaaaccgcgatgaccatttggaaggagatgaacagcgtgaacctgaagcaaaacattctgccgacccgtgaacgtgcgagcctgattctgaccaaaagtgcaaaccacatcgtggaggaagttcgtctgcgtaag

SEQ ID NO: 424 - protein, 326 aa, Artificial Sequence
  Engineered variant of Pantothenate Kinase from Escherichia coli
MHHHHHHGGSGSIKEQTEMTPYLQLDRNQWAAVRSSNPMTLSEDEIARLKGINEDLSLEEVAEVYLPLSRVLNFYVSSNLRRQAQLEQFLGTNGQRIPYIISVAGSVAVGKSTFARVLQALLSRWPEHRRVEHISTDGFLLPNQVLKERGLMGKKGFPESYDMHRLMKFVKDLKSGVPNVTAPVYSHLIYDVIPDGDKTVVQPDILILEGLNVLQSGMDYPHDPHHVFVSDFVDFSIYVDAPEDLLQTWYINRFLKLREGAFTDPDSYFHGYAKLTKEEAIKTAMTIWKEMNSVNLKQNILPTRERASLILTKSANHIVEEVRLRK

SEQ ID NO: 425 - DNA, 978 bp, Artificial Sequence
  Engineered variant of Pantothenate Kinase from Escherichia coli
atgcaccatcatcatcatcatggcggtagcggcagcatcaaagagcaggttgagatgaccccgtacctgcaactggaccgtaaccaatgggcggcggtgcgtgatagtaacccgatgaccctgagcgaggacgaaatcgcgcgtctgaagggtattaacgaagatctgagcctggaggaagtggcggaagtctacctgccgctgagccgtgttctgaacttctatattagcagcaacctgcgtcgtcaggcgcagctggaacagtttctgggtaccaatggccagcgtatcccgtatatcattagcgttgcgggtagcgtggcggttggcaaaagcacctttgcgcgtgtgctgcaggcgctgctgagccgttggccggagcatcgtcgtgttgaacatatcagcaccgacggcttcctgctgccgaaccaagtgctgaaggagcgtggtctgatggggaaaaagggtttcccggaaagctacgatatgcaccgtctgatgaaatttgttaaagacctgaagagcggtgtgccgaacgttaccgcgccggtgtacagccacctgatctatgatgttattccggacggcgataaaaccgtggttcagccggacatcctgattctggagggtctgaacgtgctgcaaagcggcatggactatccgcacgatccgcaccacgtgtttgttagcgacttcgtggattttagcatctacgttgacgcgccggaggatctgctgcagacctggtacattaaccgtttcctgaaactgcgtgagggtgcgttcaccgacccggatagctactttcacgggtatgcgaaactgaccaaggaagaggcgatcaaaaccgcgatgaccatttggaaggagatgaacagcgtgaacctgaagcaaaacattctgccgacccgtgaacgtgcgagcctgattctgaccaaaagtgcaaaccacatcgtggaggaagttcgtctgcgtaag

SEQ ID NO: 426 - protein, 326 aa, Artificial Sequence
  Engineered variant of Pantothenate Kinase from Escherichia coli
MHHHHHHGGSGSIKEQVEMTPYLQLDRNQWAAVRDSNPMTLSEDEIARLKGINEDLSLEEVAEVYLPLSRVLNFYISSNLRRQAQLEQFLGTNGQRIPYIISVAGSVAVGKSTFARVLQALLSRWPEHRRVEHISTDGFLLPNQVLKERGLMGKKGFPESYDMHRLMKFVKDLKSGVPNVTAPVYSHLIYDVIPDGDKTVVQPDILILEGLNVLQSGMDYPHDPHHVFVSDFVDFSIYVDAPEDLLQTWYINRFLKLREGAFTDPDSYFHGYAKLTKEEAIKTAMTIWKEMNSVNLKQNILPTRERASLILTKSANHIVEEVRLRK

SEQ ID NO: 427 - DNA, 978 bp, Artificial Sequence
  Engineered variant of Pantothenate Kinase from Escherichia coli
atgcaccatcatcatcatcatggcggtagcggcagcatcaaagagcaggttgagatgaccccgtacctgcaactggaccgtaaccaatgggcggcggtgcgtgatagtaacccgatgaccctgagcgaggacgaaatcgcgcgtctgaagggtattaacgaagatctgagcctggaggaagtggcgctggtctacctgccgctgagccgtgttctgaacttctatattagcagcaacctgcgtcgtcaggcgcagctggaacagtttctgggtaccaatggccagcgtatcccgtatatcattagcgttgcgggtagcgtggcggttggcaaaagcacctttgcgcgtgtgctgcaggcgctgctgagccgttggccagagcatagctacgttgaacatatcagcaccgacggcttcctgctgccgaaccaagtgctgaaggagcgtggtctgatggggaaaaagggtttcccggaaagctacgatatgcaccgtctgatgaaatttgttaaagacctgaagagcggtgtgccgaacgttaccgcgccggtgtacagccacctgatctatgatgttattccggacggcgataaaaccgtggttcagccggacatcctgattctggagggtctgaacgtgctgcaaagcggcatggactatccgcacgatccgcaccacgtgtttgttagcgacttcgtggattttagcatctacgttgacgcgccggaggatctgctgcagacctggtacattaaccgtttcctgaaactgcgtgagggtgcgttcaccgacccggatagctactttcacgggtatgcgaaactgaccaaggaagaggcgatcaaaaccgcgatgaccatttggaaggagatgaacagcgtgaacctgaagcaaaacattctgccgacccgtgaacgtgcgagcctgattctgaccaaaagtgcaaaccacatcgtggaggaagttcgtctgcgtaag

SEQ ID NO: 428 - protein, 326 aa, Artificial Sequence
  Engineered variant of Pantothenate Kinase from Escherichia coli
MHHHHHHGGSGSIKEQVEMTPYLQLDRNQWAAVRDSNPMTLSEDEIARLKGINEDLSLEEVALVYLPLSRVLNFYISSNLRRQAQLEQFLGTNGQRIPYIISVAGSVAVGKSTFARVLQALLSRWPEHSYVEHISTDGFLLPNQVLKERGLMGKKGFPESYDMHRLMKFVKDLKSGVPNVTAPVYSHLIYDVIPDGDKTVVQPDILILEGLNVLQSGMDYPHDPHHVFVSDFVDFSIYVDAPEDLLQTWYINRFLKLREGAFTDPDSYFHGYAKLTKEEAIKTAMTIWKEMNSVNLKQNILPTRERASLILTKSANHIVEEVRLRK

SEQ ID NO: 429 - DNA, 978 bp, Artificial Sequence
  Engineered variant of Pantothenate Kinase from Escherichia coli
atgcaccatcatcatcatcatggcggtagcggcagcatcaaagagcagaccgagatgaccccgtacctgcaactggatcgtaaccaatgggccgcgattcgtgacagtaacccgatgaccctgagcgaggacgaaatcgcgcgtctgaagggtattaacgaagatctgagcctggaggaagtggcggaagtctacctgccgctgagccgtgttctgaacttctatgttagcagcgccctgcgtcgtcaggcgcagctggaacagtttctgggtaccaatggccagcgtatcccgtatatcattagcgttgcgggtagcgtggcggttggcaaaagcacctttgcgcgtgtgctgcaggcgctgctgagccgttggtcggagcatcgtcgtgttgaacatatcagcaccgacggcttcctgctgccgaaccaagtgctgaaggagcgtggtctgatggggaaaaagggtttcccggaaagctacgatatgcaccgtctgatgaaatttgttaaagacctgaagagcggtgtgccgaacgttaccgcgccggtgtacagccacctgatctatgatgttattcctgacggcgataaaaccgtggttcagccggacatcctgattctggagggtctgaacgtgctgcaaagcggcatggactatccgcacgatccgcaccacgtgtttgttagcgacttcgtggattttagcatctacgttgacgcgccggaggatctgctgcagacctggtacattaaccgtttcctgaaactgcgtgagggtgcgttcaccgacccggatagctactttcacgggtatgcgaaactgaccaaggaagaggcgatcaaaaccgcgatgaccatttggaaggagatgaacagcgtgaacctgaagcaaaacattctgccgacccgtgaacgtgcgagcctgattctgaccaaaagtgcgaaccacatcgtggaggaagttcgtctgcgtaag

SEQ ID NO: 430 - protein, 326 aa, Artificial Sequence
  Engineered variant of Pantothenate Kinase from Escherichia coli
MHHHHHHGGSGSIKEQTEMTPYLQLDRNQWAAIRDSNPMTLSEDEIARLKGINEDLSLEEVAEVYLPLSRVLNFYVSSALRRQAQLEQFLGTNGQRIPYIISVAGSVAVGKSTFARVLQALLSRWSEHRRVEHISTDGFLLPNQVLKERGLMGKKGFPESYDMHRLMKFVKDLKSGVPNVTAPVYSHLIYDVIPDGDKTVVQPDILILEGLNVLQSGMDYPHDPHHVFVSDFVDFSIYVDAPEDLLQTWYINRFLKLREGAFTDPDSYFHGYAKLTKEEAIKTAMTIWKEMNSVNLKQNILPTRERASLILTKSANHIVEEVRLRK

SEQ ID NO: 431 - DNA, 978 bp, Artificial Sequence
  Engineered variant of Pantothenate Kinase from Escherichia coli
atgcaccatcatcatcatcatggcggtagcggcagcatcaaagagcagaccgagatgaccccgtacctgcaactgacgcgtaaccaatggcgtgcgattcgtgacagtaacccgatgaccctgagcgaggacgaaatcgcgcgtctgaagggtattaacgaagatctgagcctggaggaagtggcggaagtctacctgccgctgagccgtgttctgaacttctatgttagcagcgccctgcgtcgtcaggcgcagctggaacagtttctgggtaccaatagtcagcgtatcccgtatatcattagcgttgcgggtagcgtggcggttggcaaaagcacctttgcgcgtgtgctgcaggcgctgctgagccgttggccggagcatcgtcgtgttgaacatatcagcaccgacggcttcctgctgccgaaccaagtgctgaaggagcgtggtctgatggggaaaaagggtttcccggaaagctacgatatgcaccgtctgatgaaatttgttaaagacctgaagagcggtgtgccgaacgttaccgcgccggtgtacagccacctgatctatgatgttattccggacggcgataaaaccgtggttcagccggacatcctgattctggagggtctgaacgtgctgcaaagcggcatggactatccgcacgatccgcaccacgtgtttgttagcgacttcgtggattttagcatctacgttgacgcgccggaggatctgctgcagacctggtacattaaccgtttcctgaaactgcgtgagggtgcgttcaccgacccggatagctactttcacgggtatgcgaaactgaccaaggaagaggcgatcaaaaccgcgatgaccatttggaaggagatgaacagcgtgaacctgaagcaaaacattctgccgacccgtgaacgtgcgagcctgattctgaccaaaagtgcaaaccacatcgtggaggaagttcgtctgcgtaag

SEQ ID NO: 432 - protein, 326 aa, Artificial Sequence
  Engineered variant of Pantothenate Kinase from Escherichia coli
MHHHHHHGGSGSIKEQTEMTPYLQLTRNQWRAIRDSNPMTLSEDEIARLKGINEDLSLEEVAEVYLPLSRVLNFYVSSALRRQAQLEQFLGTNSQRIPYIISVAGSVAVGKSTFARVLQALLSRWPEHRRVEHISTDGFLLPNQVLKERGLMGKKGFPESYDMHRLMKFVKDLKSGVPNVTAPVYSHLIYDVIPDGDKTVVQPDILILEGLNVLQSGMDYPHDPHHVFVSDFVDFSIYVDAPEDLLQTWYINRFLKLREGAFTDPDSYFHGYAKLTKEEAIKTAMTIWKEMNSVNLKQNILPTRERASLILTKSANHIVEEVRLRK

SEQ ID NO: 433 - DNA, 978 bp, Artificial Sequence
  Engineered variant of Pantothenate Kinase from Escherichia coli
atgcaccatcatcatcatcatggcggtagcggcagcatcaaagagcagaccgagatgaccccgtacctgcaactggaccgtaaccaatgggcggcggtggccgatagtaacccgatgaccctgagcgaggacgaaaaagcgcgtctgaagggtattaacgaagatctgagcctggaggaagtggcggaagtctacctgccgctgagccgtgttctgaacttctatattagcagcagtctgcgtcgtcaggcgcagctggaacagtttctgggtaccaatggccagcctatcccgtatatcattagcgttgcgggtagcgtggcggttggcaaaagcacctttgcgcgtgtgctgcaggcgctgctgagccgttgggtagagcatcgccgcgttgaacatatcagcaccgacggcttcctgctgccgaaccaagtgctgaaggagcgtggtctgatggggaaaaagggtttcccggaaagctacgatatgcatcgtctgatgaaatttgttaaagacctgaagagcggtgtgccgaacgttaccgcgccggtgtacagccacctgatctatgatgttattccggacggcgataaaaccgtggttcagccggacatcctgattctggagggtctgaacgtgctgcaaagcggcatggactatccgcacgatccgcaccacgtgtttgttagcgacttcgtggattttagcatctacgttgacgcgccggaggatctgctgcagacctggtacattaaccgtttcctgaaactgcgtgagggtgcgttcaccgacccggatagctactttcacgggtatgcgaaactgaccaaggaagaggcgatcaaaaccgcgatgaccatttggaaggagatgaacagcgtgaacctgaagcaaaacattctgccgacccgtgaacgtgcgagcctgattctgaccaaaagtgcaaaccacatcgtggaggaagttcgtctgcgtaag

SEQ ID NO: 434 - protein, 326 aa, Artificial Sequence
  Engineered variant of Pantothenate Kinase from Escherichia coli
MHHHHHHGGSGSIKEQTEMTPYLQLDRNQWAAVADSNPMTLSEDEKARLKGINEDLSLEEVAEVYLPLSRVLNFYISSSLRRQAQLEQFLGTNGQPIPYIISVAGSVAVGKSTFARVLQALLSRWVEHRRVEHISTDGFLLPNQVLKERGLMGKKGFPESYDMHRLMKFVKDLKSGVPNVTAPVYSHLIYDVIPDGDKTVVQPDILILEGLNVLQSGMDYPHDPHHVFVSDFVDFSIYVDAPEDLLQTWYINRFLKLREGAFTDPDSYFHGYAKLTKEEAIKTAMTIWKEMNSVNLKQNILPTRERASLILTKSANHIVEEVRLRK

SEQ ID NO: 435 - DNA, 978 bp, Artificial Sequence
  Engineered variant of Pantothenate Kinase from Escherichia coli
atgcaccatcatcatcatcatggcggtagcggcagcatcaaagagcagaccgagatgaccccgtacctgcaactggatcgtaaccaatggcgtgcggttcgtagtagtaacccgatgaccctgagcgaggacgaaatcgcgcgtctgaagggtattaacgaagatctgagcctggaggaagtggcggaagtctacctgccgctgagccgtgttctgaacttctatattagcagcaacgagcgtcgtcaggcgcagctggaacagtttctgggtaccaatagtcagcgtatcccgtatatcattagcgttgcgggtagcgtggcggttggcaaaagcacctttgcgcgtgtgctgcaggcgctgctgagccgttggtcggagcatcgtcgtgttgaacatatcagcaccgacggcttcctgcacccgaaccaagtgctgaaggagcgtggtctgatggggaaaaagggtttcccggaaagctacgatatgcaccgtctgatgaaatttgttaaagacctgaagagcggtgtgccgaacgttaccgcgccggtgtacagccacctgatctatgatgttattccggacggcgataaaaccgtggttcagccggacatcctgattctggagggtctgaacgtgctgcaaagcggcatggactatccgcacgatccgcaccacgtgtttgttagcgacttcgtggattttagcatctacgttgacgcgccggaggatctgctgcagacctggtacattaaccgtttcctgaaactgcgtgagggtgcgttcaccgacccggatagctactttcacgggtatgcgaaactgaccaaggaagaggcgatcaaaaccgcgatgaccatttggaaggagatgaacctggtgaacctgaagcaaaacattctgccgacccgtgaacgtgcgagcctgattctgaccaaaagtgcaaaccacatcgtggaggaagttcgtctgcgtaag

SEQ ID NO: 436 - protein, 326 aa, Artificial Sequence
  Engineered variant of Pantothenate Kinase from Escherichia coli
MHHHHHHGGSGSIKEQTEMTPYLQLDRNQWRAVRSSNPMTLSEDEIARLKGINEDLSLEEVAEVYLPLSRVLNFYISSNERRQAQLEQFLGTNSQRIPYIISVAGSVAVGKSTFARVLQALLSRWSEHRRVEHISTDGFLHPNQVLKERGLMGKKGFPESYDMHRLMKFVKDLKSGVPNVTAPVYSHLIYDVIPDGDKTVVQPDILILEGLNVLQSGMDYPHDPHHVFVSDFVDFSIYVDAPEDLLQTWYINRFLKLREGAFTDPDSYFHGYAKLTKEEAIKTAMTIWKEMNLVNLKQNILPTRERASLILTKSANHIVEEVRLRK

SEQ ID NO: 437 - DNA, 978 bp, Artificial Sequence
  Engineered variant of Pantothenate Kinase from Escherichia coli
atgcaccatcatcatcatcatggcggtagcggcagcatcaaagagcaggttgagatgaccccgtacctgcaactggaccgtaaccaatgggcggcggtgcgtgatagtaacccgatgaccctgagcgaggacgaaaaagcgcgtctgaagggtattaacgaagatctgagcctggaggaagtggcggaagtctacctgccgctgagccgtgttctgaacttctatattagcagcaacctgcgtcgtcaggcgcagctggaacagtttctgggtaccaatggccagcgtatcccgtatatcattagcgttgcgggtagcgtggcggttggcaaaagcacctttgcgcgtgtgctgcaggcgctgctgagccgttgggtagagagcagccgcgttgaacatatcagcaccgacggcttcctgctgccgaaccaagtgctgaaggagcgtggtctgatggggaaaaagggtttcccggaaagctacgatatgcctcgtctgatgaaatttgttaaagacctgaagagcggtgtgccgaacgttaccgcgccggtgtacagccacctgatctatgatgttattccggacggcgataaaaccgtggttcagccggacatcctgattctggagggtctgaacgtgctgcaaagcggcatggactatccgcacgatccgcaccacgtgtttgttagcgacttcgtggattttagcatctacgttgacgcgccggaggatctgctgcagacctggtacattaaccgtttcctgaaactgcgtgagggtgcgttcaccgacccggatagctactttcacgggtatgcgaaactgaccaaggaagaggcgatcaaaaccgcgatgaccatttggaaggagatgaacagcgtgaacctgaagcaaaacattctgccgacccgtgaacgtgcgagcctgattctgaccaaaagtgcaaaccacatcgtggaggaagttcgtctgcgtaag

SEQ ID NO: 438 - protein, 326 aa, Artificial Sequence
  Engineered variant of Pantothenate Kinase from Escherichia coli
MHHHHHHGGSGSIKEQVEMTPYLQLDRNQWAAVRDSNPMTLSEDEKARLKGINEDLSLEEVAEVYLPLSRVLNFYISSNLRRQAQLEQFLGTNGQRIPYIISVAGSVAVGKSTFARVLQALLSRWVESSRVEHISTDGFLLPNQVLKERGLMGKKGFPESYDMPRLMKFVKDLKSGVPNVTAPVYSHLIYDVIPDGDKTVVQPDILILEGLNVLQSGMDYPHDPHHVFVSDFVDFSIYVDAPEDLLQTWYINRFLKLREGAFTDPDSYFHGYAKLTKEEAIKTAMTIWKEMNSVNLKQNILPTRERASLILTKSANHIVEEVRLRK

SEQ ID NO: 439 - DNA, 978 bp, Artificial Sequence
  Engineered variant of Pantothenate Kinase from Escherichia coli
atgcaccatcatcatcatcatggcggtagcggcagcatcaaagagcagaccgagatgaccccgtacctgcaactggaccgtaaccaatgggcggcggtgcgtgatagtaacccgatgaccctgagcgaggacgaaaaagcgcgtctgaagggtattaacgaagatctgagcctggaggaagtggcggaagtctacctgccgctgagccgtgttctgaacttctatattagcagcagtctgcgtcgtcaggcgcagctggaacagtttctgggtaccaatggccagcgtatcccgtatatcattagcgttgcgggtagcgtggcggttggcaaaagcacctttgcgcgtgtgctgcaggcgctgctgagccgttgggtagagcatcgccgcgttgaacatatcagcaccgacggcttcctgctgccgaaccaagtgctgaaggagcgtggtctgatggggaaaaagggtttcccggaaagctacgatatgcatcgtctgatgaaatttgttaaagacctgaagagcggtgtgccgaacgttaccgcgccggtgtacagccacctgatctatgatgttgtcccggacggcgataaaaccgtggttcagccggacatcctgattctggagggtctgaacgtgctgcaaagcggcatggactatccgcacgatccgcaccacgtgtttgttagcgacttcgtggattttagcatctacgttgacgcgccggaggatctgctgcagacctggtacattaaccgtttcctgaaactgcgtgagggtgcgttcaccgacccggatagctactttcacgggtatgcgaaactgaccaaggaagaggcgatcaaaaccgcgatgaccatttggaaggagatgaacagcgtgaacctgaagcaaaacattctgccgacccgtgaacgtgcgagcctgattctgaccaaaagtgcaaaccacatcgtggaggaagttcgtctgcgtaag

SEQ ID NO: 440 - protein, 326 aa, Artificial Sequence
  Engineered variant of Pantothenate Kinase from Escherichia coli
MHHHHHHGGSGSIKEQTEMTPYLQLDRNQWAAVRDSNPMTLSEDEKARLKGINEDLSLEEVAEVYLPLSRVLNFYISSSLRRQAQLEQFLGTNGQRIPYIISVAGSVAVGKSTFARVLQALLSRWVEHRRVEHISTDGFLLPNQVLKERGLMGKKGFPESYDMHRLMKFVKDLKSGVPNVTAPVYSHLIYDVVPDGDKTVVQPDILILEGLNVLQSGMDYPHDPHHVFVSDFVDFSIYVDAPEDLLQTWYINRFLKLREGAFTDPDSYFHGYAKLTKEEAIKTAMTIWKEMNSVNLKQNILPTRERASLILTKSANHIVEEVRLRK

SEQ ID NO: 441 - DNA, 978 bp, Artificial Sequence
  Engineered variant of Pantothenate Kinase from Escherichia coli
atgcaccatcatcatcatcatggcggtagcggcagcatcaaagagcagaccgagatgaccccgtacctgcaactggatcgtaaccaatgggccgcgattcgtagtagtaacccgatgaccctgagcgaggacgaaatcgcgcgtctgaagggtattaacgaagatctgagcctggaggaagtggcggaagtctacctgccgctgagccgtgttctgaacttctatgttagcagcgccctgcgtcgtcaggcgcagctggaacagtttctgggtaccaatggccagcgtatcccgtatatcattagcgttgcgggtagcgtggcggttggcaaaagcacctttgcgcgtgtgctgcagacgctgctgagccgttggccggagcatcgtcgtgttgaacatatcagcaccgacggcttcctgcacccgaaccaagtgctgaaggagcgtggtctgatggggaaaaagggtttcccggaaagctacgatatgcaccgtctgatgaaatttgttaaagacctgaagagcggtgtgccgaacgttaccgcgccggtgtacagccacctgatctatgatgttattcctgacggcgatcgtaccgtggttcagccggacatcctgattctggagggtctgaacgtgctgcaaagcggcatggactatgagcatgatccgcaccacgtatttgttagcgacttcgtggattttagcatctacgttgacgcgccggaggatctgctgcagacctggtacattaaccgtttcctgaaactgcgtgagggtgcgttcaccgacccggatagctactttcacgggtatgcgaaactgaccaaggaagaggcgatcaaaaccgcgatgaccatttggaaggagatgaacagcgtgaacctgaagcaaaacattctgccgacccgtgaacgtgcgagcctgattctgaccaaaagtgcaaaccacatcgtggaggaagttcgtctgcgtaag

SEQ ID NO: 442 - protein, 326 aa, Artificial Sequence
  Engineered variant of Pantothenate Kinase from Escherichia coli
MHHHHHHGGSGSIKEQTEMTPYLQLDRNQWAAIRSSNPMTLSEDEIARLKGINEDLSLEEVAEVYLPLSRVLNFYVSSALRRQAQLEQFLGTNGQRIPYIISVAGSVAVGKSTFARVLQTLLSRWPEHRRVEHISTDGFLHPNQVLKERGLMGKKGFPESYDMHRLMKFVKDLKSGVPNVTAPVYSHLIYDVIPDGDRTVVQPDILILEGLNVLQSGMDYEHDPHHVFVSDFVDFSIYVDAPEDLLQTWYINRFLKLREGAFTDPDSYFHGYAKLTKEEAIKTAMTIWKEMNSVNLKQNILPTRERASLILTKSANHIVEEVRLRK

SEQ ID NO: 443 - DNA, 978 bp, Artificial Sequence
  Engineered variant of Pantothenate Kinase from Escherichia coli
atgcaccatcatcatcatcatggcggtagcggcagcatcaaagagcagaccgagatgaccccgtacctgcaactggatcgtaaccaatgggccgcggttcgtgacagtaacccgatgaccctgagcgaggacgaaatcgcgcgtctgaagggtattaacgaagatctgagcctggaggaagtggcggaagtctacctgccgctgagccgtgttctgaacttctatattagcagcaacctgcgtcgtcaggcgcagctggaacagtttctgggtaccaatagtggtcgtatcccgtatatcattagcgttgcgggtagcgtggcggttggcaaaagcacctttgcgcgtgtgctgcagacgctgctgagccgttggccggagcatcgtcgtgttgaacatatcagcaccgacggcttcctgctgccgaaccaagtgctgaaggagcgtggtctgatggggaaaaagggtttcccggaaagctacgatatgcaccgtctgatgaaatttgttaaagacctgaagagcggtgtgccgaacgttaccgcgccggtgtacagccacctgatctatgatgttattccggacggcgataaaaccgtggttcagccggacatcctgattctggagggtctgaacgtgctgcaaagcggcatggactatcctcatgatccgcaccacgtatttgttagcgacttcgtggattttagcatctacgttgacgcgccggaggatctgctgcagacctggtacattaaccgtttcctgaaactgcgtgagggtgcgttcaccgacccggatagctactttcacgggtatgcgaaactgaccaaggaagaggcgatcaaaaccgcgatgaccatttggaaggagggtaacagcgtgaacctgaagcaaaacattctgccgacccgtgaacgtgcgagcctgattctgaccaaaagtgcgaaccacatcgtggaggaagttcgtctgcgtaag

SEQ ID NO: 444 - protein, 326 aa, Artificial Sequence
  Engineered variant of Pantothenate Kinase from Escherichia coli
MHHHHHHGGSGSIKEQTEMTPYLQLDRNQWAAVRDSNPMTLSEDEIARLKGINEDLSLEEVAEVYLPLSRVLNFYISSNLRRQAQLEQFLGTNSGRIPYIISVAGSVAVGKSTFARVLQTLLSRWPEHRRVEHISTDGFLLPNQVLKERGLMGKKGFPESYDMHRLMKFVKDLKSGVPNVTAPVYSHLIYDVIPDGDKTVVQPDILILEGLNVLQSGMDYPHDPHHVFVSDFVDFSIYVDAPEDLLQTWYINRFLKLREGAFTDPDSYFHGYAKLTKEEAIKTAMTIWKEGNSVNLKQNILPTRERASLILTKSANHIVEEVRLRK

SEQ ID NO: 445 - DNA, 978 bp, Artificial Sequence
  Engineered variant of Pantothenate Kinase from Escherichia coli
atgcaccatcatcatcatcatggcggtagcggcagcatcaaagagcagaccgagatgaccccgtacctgcaactggaccgtaaccaatgggcggcggtgcgtgatagtaacccgatgaccctgagcgaggacgaaatcgcgcgtctgaagggtattaacgaagatctgagcctggaggaagtggcggaagtctacctgccgctgagccgtgttctgaacttctatattagcagcagtctgcgtcgtcaggcgcagctggaacagtttctgggtaccaatggccagcctatcccgtatatcattagcgttgcgggtagcgtggcggttggcaaaagcacctttgcacgtgtgctgcaggcgctgctgagccgttggcaagagcatagccgcgttgaacatatcagcaccgacggcttcctgctgccgaaccaagtgctgaaggagcgtggtctgatggggaaaaagggtttcccggaaagctacgatatgcaccgtctgatgaaatttgttaaagacctgaagagcggtgtgccgaacgttaccgcgccggtgtacagccacctgatctatgatgttattccggacggcgataaaaccgtggttcagccggacatcctgattctggagggtctgaacgtgctgcaaagcggcatggactatccgcacgatccgcaccacgtgtttgttagcgacttcgtggattttagcatctacgttgacgcgccggaggatctgctgcagacctggtacattaaccgtttcctgaaactgcgtgagggtgcgttcaccgacccggatagctactttcacgggtatgcgaaactgaccaaggaagaggcgatcaaaaccgcgatgaccatttggaaggagatgaacagcgtgaacctgaagcaaaacattctgccgacccgtgaacgtgcgagcctgattctgaccaaaagtgcaaaccacatcgtggaggaagttcgtctgcgtaag

SEQ ID NO: 446 - protein, 326 aa, Artificial Sequence
  Engineered variant of Pantothenate Kinase from Escherichia coli
MHHHHHHGGSGSIKEQTEMTPYLQLDRNQWAAVRDSNPMTLSEDEIARLKGINEDLSLEEVAEVYLPLSRVLNFYISSSLRRQAQLEQFLGTNGQPIPYIISVAGSVAVGKSTFARVLQALLSRWQEHSRVEHISTDGFLLPNQVLKERGLMGKKGFPESYDMHRLMKFVKDLKSGVPNVTAPVYSHLIYDVIPDGDKTVVQPDILILEGLNVLQSGMDYPHDPHHVFVSDFVDFSIYVDAPEDLLQTWYINRFLKLREGAFTDPDSYFHGYAKLTKEEAIKTAMTIWKEMNSVNLKQNILPTRERASLILTKSANHIVEEVRLRK

SEQ ID NO: 447 - DNA, 978 bp, Artificial Sequence
  Engineered variant of Pantothenate Kinase from Escherichia coli
atgcaccatcatcatcatcatggcggtagcggcagcatcaaagagcagaccgagatgaccccgtacctgcaactggatcgtaaccaatgggccgcgattcgtagtagtaacccgatgaccctgagcgaggacgaaatcgcgcgtctgaagggtattaacgaagatctgagcctggaggaagtggcggaagtctacctgccgctgagccgtgttctgaacttctatattagcagcaacctgcgtcgtcaggcgcagctggaacagtttctgggtaccaatggccagcgtatcccgtatatcattagcgttgcgggtagcgtggcggttggcaaaagcacctttgcgcgtgtgctgcaggcgctgctgagccgttggccggagcatcgtcgtgttgaacatatcagcaccgacggcttcctgctgccgaaccaagtgctgaaggagcgtggtctgatggggaaaaagggtttcccggaaagctacgatatgcaccgtctgatgaaatttgttaaagacctgaagagcggtgtgccgaacgttaccgcgccggtgtacagccacctgatctatgatgttattccggacggcgataaaaccgtggttcagccggacatcctgattctggagggtctgaacgtgctgcaaagcggcatggactatccgcacgatccgcaccacgtgtttgttagcgacttcgtggattttagcatctacgttgacgcgccggaggatctgctgcagacctggtacattaaccgtttcctgaaactgcgtgagggtgcgttcaccgacccggatagctactttcacgggtatgcgaaactgaccaaggaagaggcgatcaaaaccgcgatgaccatttggaaggagatgaacagcgtgaacctgaagcaaaacattctgccgacccgtgaacgtgcgagcctgattctgaccaaaagtgcaaaccacatcgtggaggaagttcgtctgcgtaag

SEQ ID NO: 448 - protein, 326 aa, Artificial Sequence
  Engineered variant of Pantothenate Kinase from Escherichia coli
MHHHHHHGGSGSIKEQTEMTPYLQLDRNQWAAIRSSNPMTLSEDEIARLKGINEDLSLEEVAEVYLPLSRVLNFYISSNLRRQAQLEQFLGTNGQRIPYIISVAGSVAVGKSTFARVLQALLSRWPEHRRVEHISTDGFLLPNQVLKERGLMGKKGFPESYDMHRLMKFVKDLKSGVPNVTAPVYSHLIYDVIPDGDKTVVQPDILILEGLNVLQSGMDYPHDPHHVFVSDFVDFSIYVDAPEDLLQTWYINRFLKLREGAFTDPDSYFHGYAKLTKEEAIKTAMTIWKEMNSVNLKQNILPTRERASLILTKSANHIVEEVRLRK

SEQ ID NO: 449 - DNA, 978 bp, Artificial Sequence
  Engineered variant of Pantothenate Kinase from Escherichia coli
atgcaccatcatcatcatcatggcggtagcggcagcatcaaagagcagaccgagatgaccccgtacctgcaactggaccgtaaccaatgggcggcggtgcgtcgcagtaacccgatgaccctgagcgaggacgaaatcgcgcgtctgaagggtattaacgaagatctgagcctggaggaagtggcggaagtctacctgccgctgagccgtgttctgaacttctatattagcagcaacctgcgtcgtcaggcgagtctggaacagtttctgggtaccaatggccagcgtatcccgtatatcattagcgttgcgggtagcgtggcggttggcaaaagcacctttgcgcgtgtgctgcaggcgctgctgagccgttggccggagcatcgtcgtgttgaacatatcagcaccgacggcttcctgcacccgaaccaagtgctgaaggagcgtggtctgatggggaaaaagggtttcccggaaagctacgatatgcaccgtctgatgaaatttgttaaagacctgaagagcggtgtgccgaacgttaccgcgccggtgtacagccacctgatctatgatgttattccggacggcgataaaaccgtggttcagccggacatcctgattctggagggtctgaacgtgctgcaaagcggctgcgactatccgcacgatccgcaccacgtgtttgttagcgacttcgtggattttagcatctacgttgacgcgccggaggatctgctgcagacctggtacattaaccgtttcctgaaactgcgtgagggtgcgttcaccgacccggatagctactttcacgggtatgcgaagctgaccaaggaagaggcgatcaaaaccgcgatgaccatttggaaggagatgaacagcgtgaacctgaagcaaaacattctgccgacccgtgaacgtgcgagcctgattctgaccaaaagtgcaaaccacatcgtggaggaagttcgtctgcgtaag

SEQ ID NO: 450 - protein, 326 aa, Artificial Sequence
  Engineered variant of Pantothenate Kinase from Escherichia coli
MHHHHHHGGSGSIKEQTEMTPYLQLDRNQWAAVRRSNPMTLSEDEIARLKGINEDLSLEEVAEVYLPLSRVLNFYISSNLRRQASLEQFLGTNGQRIPYIISVAGSVAVGKSTFARVLQALLSRWPEHRRVEHISTDGFLHPNQVLKERGLMGKKGFPESYDMHRLMKFVKDLKSGVPNVTAPVYSHLIYDVIPDGDKTVVQPDILILEGLNVLQSGCDYPHDPHHVFVSDFVDFSIYVDAPEDLLQTWYINRFLKLREGAFTDPDSYFHGYAKLTKEEAIKTAMTIWKEMNSVNLKQNILPTRERASLILTKSANHIVEEVRLRK

SEQ ID NO: 451 - DNA, 978 bp, Artificial Sequence
  Engineered variant of Pantothenate Kinase from Escherichia coli
atgcaccatcatcatcatcatggcggtagcggcagcatcaaagagcaggttgagatgaccccgtacctgcaactggaccgtaaccaatgggcggcggtgcgtgatagtaacccgatgaccctgagcgaggacgaaaaagcgcgtctgaagggtattaacgaagatctgagcctggaggaagtggcggaagtctacctgccgctgagccgtgttctgaacttctatattagcagcaatctgcgtcgtcaggcgcagctggaacagtttctgggtaccaatggccagcgtatcccgtatatcattagcgttgcgggtagcgtggcggttggcaaaagcacctttgcgcgtgtgctgcaggcgctgctgagccgttggccggagcatcgtcgtgttgaacatatcagcaccgacggcttcctgctgccgaaccaagtgctgaaggagcgtggtctgatggggaaaaagggtttcccggaaagctacgatatgcaccgtctgatgaaatttgttaaagacctgaagagcggtgtgccgaacgttaccgcgccggtgtacagccacctgatctatgatgttattccggacggcgataaaaccgtggttcagccggacatcctgattctggagggtctgaacgtgctgcaaagcggcatggactatccgcacgatccgcaccacgtgtttgttagcgacttcgtggattttagcatctacgttgacgcgccggaggatctgctgcagacctggtacattaaccgtttcctgaaactgcgtgagggtgcgttcaccgacccggatagctactttcacgggtatgcgaaactgaccaaggaagaggcgatcaaaaccgcgatgaccatttggaaggagatgaacagcgtgaacctgaagcaaaacattctgccgacccgtgaacgtgcgagcctgattctgaccaaaagtgcaaaccacatcgtggaggaagttcgtctgcgtaag

SEQ ID NO: 452 - protein, 326 aa, Artificial Sequence
  Engineered variant of Pantothenate Kinase from Escherichia coli
MHHHHHHGGSGSIKEQVEMTPYLQLDRNQWAAVRDSNPMTLSEDEKARLKGINEDLSLEEVAEVYLPLSRVLNFYISSNLRRQAQLEQFLGTNGQRIPYIISVAGSVAVGKSTFARVLQALLSRWPEHRRVEHISTDGFLLPNQVLKERGLMGKKGFPESYDMHRLMKFVKDLKSGVPNVTAPVYSHLIYDVIPDGDKTVVQPDILILEGLNVLQSGMDYPHDPHHVFVSDFVDFSIYVDAPEDLLQTWYINRFLKLREGAFTDPDSYFHGYAKLTKEEAIKTAMTIWKEMNSVNLKQNILPTRERASLILTKSANHIVEEVRLRK

SEQ ID NO: 453 - DNA, 978 bp, Artificial Sequence
  Engineered variant of Pantothenate Kinase from Escherichia coli
atgcaccatcatcatcatcatggcggtagcggcagcatcaaagagcagaccgagatgaccccgtacctgcaactggaccgtaaccaatgggcggcggtgcgtgatagtaacccgatgaccctgagcgaggacgaaatcgcgcgtctgaagggtattaacgaagatctgagcctggaggaagtggcggaagtctacctgccgctgagccgtgttctgaacttctatattagcagcaacctgcgtcgtcaggcgcagctggaacagtttctgggtaccaatagtcagcgtatcccgtatatcattagcgttgcgggtagcgtggcggttggcaaaagcacctttgcgcgtgtgctgcaggcgctgctgagccgttggccggagcatcgtcgtgttgaacatatcagcaccgacggcttcctgctgccgaaccaagtgctgaaggagcgtggtctgatggggaaaaagggtttcccggaaagctacgatatgcaccgtctgatgaaatttgttaaagacctgaagagcggtgtgccgaacgttaccgcgccggtgtacagccacctgatctatgatgttattcctgacggcgataaaaccgtggttcagccggacatcctgattctggagggtctgaacgtgctgcaaagcggcatggactatccgcacgatccgcaccacgtgtttgttagcgacttcgtggattttagcatctacgttgacgcgccggaggatctgctgcagacctggtacattaaccgtttcctgaaactgcgtgagggtgcgttcaccgacccggatagctactttcacgggtatgcgaaactgaccaaggaagaggcgatcaaaaccgcgatgaccatttggaaggagatgaacctggtgaacctgaagcaaaacattctgccgacccgtgaacgtgcgagcctgattctgaccaaaagtgcaaaccacatcgtggaggaagttcgtctgcgtaag

SEQ ID NO: 454 - protein, 326 aa, Artificial Sequence
  Engineered variant of Pantothenate Kinase from Escherichia coli
MHHHHHHGGSGSIKEQTEMTPYLQLDRNQWAAVRDSNPMTLSEDEIARLKGINEDLSLEEVAEVYLPLSRVLNFYISSNLRRQAQLEQFLGTNSQRIPYIISVAGSVAVGKSTFARVLQALLSRWPEHRRVEHISTDGFLLPNQVLKERGLMGKKGFPESYDMHRLMKFVKDLKSGVPNVTAPVYSHLIYDVIPDGDKTVVQPDILILEGLNVLQSGMDYPHDPHHVFVSDFVDFSIYVDAPEDLLQTWYINRFLKLREGAFTDPDSYFHGYAKLTKEEAIKTAMTIWKEMNLVNLKQNILPTRERASLILTKSANHIVEEVRLRK

SEQ ID NO: 455 - DNA, 978 bp, Artificial Sequence
  Engineered variant of Pantothenate Kinase from Escherichia coli
atgcaccatcatcatcatcatggcggtagcggcagcatcaaagagcagaccgagatgaccccgtacctgcaactggaccgtaaccaatgggcggcggtggccgatagtaacccgatgaccctgagcgaggacgaaaaagcgcgtctgaagggtattaacgaagatctgagcctggaggaagtggcggaagtctacctgccgctgagccgtgttctgaacttctatattagcagcaacctgcgtcgtcaggcgcagctggaacagtttctgggtaccaatggccagcgtatcccgtatatcattagcgttgcgggtagcgtggcggttggcaaaagcacctttgcgcgtgtgctgcaggcgctgctgagccgttggccggagcatcgtcgtgttgaacatatcagcaccgacggcttcctgctgccgaaccaagtgctgaaggagcgtggtctgatggggaaaaagggtttcccggaaagctacgatatgcctcgtctgatgaaatttgttaaagacctgaagagcggtgtgccgaacgttaccgcgccggtgtacagccacctgatctatgatgttattccggacggcgataaaaccgtggttcagccggacatcctgattctggagggtctgaacgtgctgcaaagcggcatggactatccgcacgatccgcaccacgtgtttgttagcgacttcgtggattttagcatctacgttgacgcgccggaggatctgctgcagacctggtacattaaccgtttcctgaaactgcgtgagggtgcgttcaccgacccggatagctactttcacgggtatgcgaaactgaccaaggaagaggcgatcaaaaccgcgatgaccatttggaaggagatgaacagcgtgaacctgaagcaaaacattctgccgacccgtgaacgtgcgagcctgattctgaccaaaagtgcaaaccacatcgtggaggaagttcgtctgcgtaag

SEQ ID NO: 456 - protein, 326 aa, Artificial Sequence
  Engineered variant of Pantothenate Kinase from Escherichia coli
MHHHHHHGGSGSIKEQTEMTPYLQLDRNQWAAVADSNPMTLSEDEKARLKGINEDLSLEEVAEVYLPLSRVLNFYISSNLRRQAQLEQFLGTNGQRIPYIISVAGSVAVGKSTFARVLQALLSRWPEHRRVEHISTDGFLLPNQVLKERGLMGKKGFPESYDMPRLMKFVKDLKSGVPNVTAPVYSHLIYDVIPDGDKTVVQPDILILEGLNVLQSGMDYPHDPHHVFVSDFVDFSIYVDAPEDLLQTWYINRFLKLREGAFTDPDSYFHGYAKLTKEEAIKTAMTIWKEMNSVNLKQNILPTRERASLILTKSANHIVEEVRLRK

SEQ ID NO: 457 - DNA, 978 bp, Artificial Sequence
  Engineered variant of Pantothenate Kinase from Escherichia coli
atgcaccatcatcatcatcatggcggtagcggcagcatcaaagagcagaccgagatgaccccgtacctgcaactggaccgtaaccaatgggcggcggtggccgatagtaacccgatgaccctgagcgaggacgaaaaagcgcgtctgaagggtattaacgaagatctgagcctggaggaagtggcggaagtctacctgccgctgagccgtgttctgaacttctatattagcagcaacctgcgtcgtcaggcgcagctggaacagtttctgggtaccaatggccagcgtatcccgtatatcattagcgttgcgggtagcgtggcggttggcaaaagcacctttgcgcgtgtgctgcaggcgctgctgagccgttggccggagcatcgtcgtgttgaacatatcagcaccgacggcttcctgctgccgaaccaagtgctgaaggagcgtggtctgatggggaaaaagggtttcccggaaagctacgatatgcaccgtctgatgaaatttgttaaagacctgaagagcggtgtgccgaacgttaccgcgccggtgtacagccacctgatctatgatgttattccggacggcgataaaaccgtggttcagccggacatcctgattctggagggtctgaacgtgctgcaaagcggcatggactatccgcacgatccgcaccacgtgtttgttagcgacttcgtggattttagcatctacgttgacgcgccggaggatctgctgcagacctggtacattaaccgtttcctgaaactgcgtgagggtgcgttcaccgacccggatagctactttcacgggtatgcgaaactgaccaaggaagaggcgatcaaaaccgcgatgaccatttggaaggagatgaacagcgtgaacctgaagcaaaacattctgccgacccgtgaacgtgcgagcctgattctgaccaaaagtgcaaaccacatcgtggaggaagttcgtctgcgtaag

SEQ ID NO: 458 - protein, 326 aa, Artificial Sequence
  Engineered variant of Pantothenate Kinase from Escherichia coli
MHHHHHHGGSGSIKEQTEMTPYLQLDRNQWAAVADSNPMTLSEDEKARLKGINEDLSLEEVAEVYLPLSRVLNFYISSNLRRQAQLEQFLGTNGQRIPYIISVAGSVAVGKSTFARVLQALLSRWPEHRRVEHISTDGFLLPNQVLKERGLMGKKGFPESYDMHRLMKFVKDLKSGVPNVTAPVYSHLIYDVIPDGDKTVVQPDILILEGLNVLQSGMDYPHDPHHVFVSDFVDFSIYVDAPEDLLQTWYINRFLKLREGAFTDPDSYFHGYAKLTKEEAIKTAMTIWKEMNSVNLKQNILPTRERASLILTKSANHIVEEVRLRK

SEQ ID NO: 459 - DNA, 978 bp, Artificial Sequence
  Engineered variant of Pantothenate Kinase from Escherichia coli
atgcaccatcatcatcatcatggcggtagcggcagcatcaaagagcagaccgagatgaccccgtacctgcaactggatcgtaaccaatggcgtgcgattcgtagtagtaacccgatgaccctgagcgaggacgaaatcgcgcgtctgaagggtattaacgaagatctgagcctggaggaagtggcggaagtctacctgccgctgagccgtgttctgaacttctatattagcagcaacctgcgtcgtcaggcgcagctggaacagtttctgggtaccaatggccagcgtatcccgtatatcattagcgttgcgggtagcgtggcggttggcaaaagcacctttgcgcgtgtgctgcaggcgctgctgagccgttggtcggagcatcgtcgtgttgaacatatcagcaccgacggcttcctgctgccgaaccaagtgctgaaggagcgtggtctgatggggaaaaagggtttcccggaaagctacgatatgcaccgtctgatgaaatttgttaaagacctgaagagcggtgtgccgaacgttaccgcgccggtgtacagccacctgatctatgatgttattccggacggcgataaaaccgtggttcagccggacatcctgattctggagggtctgaacgtgctgcaaagcggcatggactatccgcacgatccgcaccacgtgtttgttagcgacttcgtggattttagcatctacgttgacgcgccggaggatctgctgcagacctggtacattaaccgtttcctgaaactgcgtgagggtgcgttcaccgacccggatagctactttcacgggtatgcgaaactgaccaaggaagaggcgatcaaaaccgcgatgaccatttggaaggagatgaacagcgtgaacctgaagcaaaacattctgccgacccgtgaacgtgcgagcctgattctgaccaaaagtgcaaaccacatcgtggaggaagttcgtctgcgtaag

SEQ ID NO: 460 - protein, 326 aa, Artificial Sequence
  Engineered variant of Pantothenate Kinase from Escherichia coli
MHHHHHHGGSGSIKEQTEMTPYLQLDRNQWRAIRSSNPMTLSEDEIARLKGINEDLSLEEVAEVYLPLSRVLNFYISSNLRRQAQLEQFLGTNGQRIPYIISVAGSVAVGKSTFARVLQALLSRWSEHRRVEHISTDGFLLPNQVLKERGLMGKKGFPESYDMHRLMKFVKDLKSGVPNVTAPVYSHLIYDVIPDGDKTVVQPDILILEGLNVLQSGMDYPHDPHHVFVSDFVDFSIYVDAPEDLLQTWYINRFLKLREGAFTDPDSYFHGYAKLTKEEAIKTAMTIWKEMNSVNLKQNILPTRERASLILTKSANHIVEEVRLRK

SEQ ID NO: 461 - DNA, 978 bp, Artificial Sequence
  Engineered variant of Pantothenate Kinase from Escherichia coli
atgcaccatcatcatcatcatggcggtagcggcagcatcaaagagcagaccgagatgaccccgtacctgcaactggaccgtaaccaatgggcggcggtgcgtgatagtaacccgatgaccctgagcgaggacgaaatcgcgcgtctgaagggtattaacgaagatctgagcctggaggaagtggcggaagtctacctgccgctgagccgtgttctgaacttctatattagcagcaacctgcgtcgtcaggcgcagctggaacagtttctgggtaccaacggccagcgtatcccgtatatcattagcgttgcgggtagcgtggcggttggcaaaagcacctttgcgcgtgtgctgcaggcgctgctgagccgttggccggagcatcgtcgtgttgaacatatcagcaccgacggcttcctgctgccgaaccaagtgctgaaggagcgtggtctgatggggaaaaagggtttcccggaaagctacgatatgagccgtctgatgaaatttgttaaagacctgaagagcggtgtgccgaacgttaccgcgccggtgtacagccacctgatctatgatgttattccggacggcgataaaaccgtggttcagccggacatcctgattctggagggtctgaacgtgctgcaaagcggcatggactatccgcacgatccgcaccacgtgtttgttagcgacttcgtggattttagcatctacgttgacgcgccggaggatctgctgcagacctggtacattaaccgtttcctgaaactgcgtgagggtgcgttcaccgacccggatagctactttcacgggtatgcgaaactgaccaaggaagaggcgatcaaaaccgcgatgaccatttggaaggagatgaacagcgtgaacctgaagcaaaacattctgccgacccgtgaacgtgcgagcctgattctgaccaaaagtgcaaaccacatcgtggaggaagttcgtctgcgtaag

SEQ ID NO: 462 - protein, 326 aa, Artificial Sequence
  Engineered variant of Pantothenate Kinase from Escherichia coli
MHHHHHHGGSGSIKEQTEMTPYLQLDRNQWAAVRDSNPMTLSEDEIARLKGINEDLSLEEVAEVYLPLSRVLNFYISSNLRRQAQLEQFLGTNGQRIPYIISVAGSVAVGKSTFARVLQALLSRWPEHRRVEHISTDGFLLPNQVLKERGLMGKKGFPESYDMSRLMKFVKDLKSGVPNVTAPVYSHLIYDVIPDGDKTVVQPDILILEGLNVLQSGMDYPHDPHHVFVSDFVDFSIYVDAPEDLLQTWYINRFLKLREGAFTDPDSYFHGYAKLTKEEAIKTAMTIWKEMNSVNLKQNILPTRERASLILTKSANHIVEEVRLRK

SEQ ID NO: 463 - DNA, 978 bp, Artificial Sequence
  Engineered variant of Pantothenate Kinase from Escherichia coli
atgcaccatcatcatcatcatggcggtagcggcagcatcaaagagcagaccgagatgaccccgtacctgcaactggaccgtaaccaatgggcggcggtggccgatagtaacccgatgaccctgagcgaggacgaaatcgcgcgtctgaagggtattaacgaagatctgagcctggaggaagtggcggaagtctacctgccgctgagccgtgttctgaacttctatattagcagcaacctgcgtcgtcaggcgcagctggaacagtttctgggtaccaatggccagcgtatcccgtatatcattagcgttgcgggtagcgtggcggttggcaaaagcacctttgcgcgtgtgctgcaggcgctgctgagccgttggccggagcatcgtcgtgttgaacatatcagcaccgacggcttcctgctgccgaaccaagtgctgaaggagcgtggtctgatggggaaaaagggtttcccggaaagctacgatatgcaccgtctgatgaaatttgttaaagacctgaagagcggtgtgccgaacgttaccgcgccggtgtacagccacctgatctatgatgttattccggacggcgataaaaccgtggttcagccggacatcctgattctggagggtctgaacgtgctgcaaagcggcatggactatccgcacgatccgcaccacgtgtttgttagcgacttcgtggattttagcatctacgttgacgcgccggaggatctgctgcagacctggtacattaaccgtttcctgaaactgcgtgagggtgcgttcaccgacccggatagctactttcacgggtatgcgaaactgaccaaggaagaggcgatcaaaaccgcgatgaccatttggaaggagatgaacagcgtgaacctgaagcaaaacattctgccgacccgtgaacgtgcgagcctgattctgaccaaaagtgcaaaccacatcgtggaggaagttcgtctgcgtaag

SEQ ID NO: 464 - protein, 326 aa, Artificial Sequence
  Engineered variant of Pantothenate Kinase from Escherichia coli
MHHHHHHGGSGSIKEQTEMTPYLQLDRNQWAAVADSNPMTLSEDEIARLKGINEDLSLEEVAEVYLPLSRVLNFYISSNLRRQAQLEQFLGTNGQRIPYIISVAGSVAVGKSTFARVLQALLSRWPEHRRVEHISTDGFLLPNQVLKERGLMGKKGFPESYDMHRLMKFVKDLKSGVPNVTAPVYSHLIYDVIPDGDKTVVQPDILILEGLNVLQSGMDYPHDPHHVFVSDFVDFSIYVDAPEDLLQTWYINRFLKLREGAFTDPDSYFHGYAKLTKEEAIKTAMTIWKEMNSVNLKQNILPTRERASLILTKSANHIVEEVRLRK

SEQ ID NO: 465 - DNA, 978 bp, Artificial Sequence
  Engineered variant of Pantothenate Kinase from Escherichia coli
atgcaccatcatcatcatcatggcggtagcggcagcatcaaagagcagaccgagctgaccccgtacctgcaactggaccgtaaccaatgggcggcggtgcgtcgcagtaacccgatgaccctgagcgaggacgaaatcgcgcgtctgaagggtattaacgaagatctgagcctggaggaagtggcggaagtctacctgccgctgagccgtgttctgaacttctatatttcgagcaacctgcgtcgtcaggcgagtctggaacagtttctgggtaccaatggccagcgtatcccgtatatcattagcgttgcgggtagcgtggcggttggcaaaagcacctttgcgcgtgtgctgcaggcgctgctgagccgttggccggagcatcgtcgtgttgaacatatcagcaccgacggcttcctgctgccgaaccaagtcctgaaggagcgtggtctgatggggaaaaagggtttcccggaaagctacgatatgcaccgtctgatgaaatttgttaaagacctgaagagcggtgtgccgaacgttaccgcgccggtgtacagccacctgatctatgatgttattccggacggcgataaaaccgtggttcagccggacatcctgattctggagggtctgaacgtgctgcaaagcggcatggactatccgcacgatccgcaccacgtgtttgttagcgacttcgtggattttagcatctacgttgacgcgccggaggatctgctgcagacctggtacattaaccgtttcctgaaactgcgtgagggtgcgttcaccgacccggatagctactttcacgggtatgcggcactgaccaaggaagaggcgatcaaaaccgcgatgaccatttggaaggagatgaacagcgtgaacctgaagcaaaacattctgccgacccgtgaacgtgcgagcctgattctgaccaaaagtgcaaaccacatcgtggaggaagttcgtctgcgtaag

SEQ ID NO: 466 - protein, 326 aa, Artificial Sequence
  Engineered variant of Pantothenate Kinase from Escherichia coli
MHHHHHHGGSGSIKEQTELTPYLQLDRNQWAAVRRSNPMTLSEDEIARLKGINEDLSLEEVAEVYLPLSRVLNFYISSNLRRQASLEQFLGTNGQRIPYIISVAGSVAVGKSTFARVLQALLSRWPEHRRVEHISTDGFLLPNQVLKERGLMGKKGFPESYDMHRLMKFVKDLKSGVPNVTAPVYSHLIYDVIPDGDKTVVQPDILILEGLNVLQSGMDYPHDPHHVFVSDFVDFSIYVDAPEDLLQTWYINRFLKLREGAFTDPDSYFHGYAALTKEEAIKTAMTIWKEMNSVNLKQNILPTRERASLILTKSANHIVEEVRLRK

SEQ ID NO: 467 - DNA, 978 bp, Artificial Sequence
  Engineered variant of Pantothenate Kinase from Escherichia coli
atgcaccatcatcatcatcatggcggtagcggcagcatcaaagagcagaccgagatgaccccgtacctgcaactgacgcgtaaccaatgggccgcggttcgtagtagtaacccgatgaccctgagcgaggacgaaatcgcgcgtctgaagggtattaacgaagatctgagcctggaggaagtggcggaagtctacctgccgctgagccgtgttctgaacttctatattagcagcgccctgcgtcgtcaggcgcagctggaacagtttctgggtaccaatggtcagcgtatcccgtatatcattagcgttgcgggtagcgtggcggttggcaaaagcacctttgcgcgtgtgctgcagacgctgctgagccgttggtcggagcatcgtcgtgttgaacatatcagcaccgacggcttcctgctgccgaaccaagtgctgaaggagcgtggtctgatggggaaaaagggtttcccggaaagctacgatatgcaccgtctgatgaaatttgttaaagacctgaagagcggtgtgccgaacgttaccgcgccggtgtacagccacctgatctatgatgttattcatgacggcgatcgtaccgtggttcagccggacatcctgattctggagggtctgaacgtgctgcaaagcggcatggactatccgcacgatccgcaccacgtgtttgttagcgacttcgtggattttagcatctacgttgacgcgccggaggatctgctgcagacctggtacattaaccgtttcctgaaactgcgtgagggtgcgttcaccgacccggatagctactttcacgggtatgcgaaactgaccaaggaagaggcgatcaaaaccgcgatgaccatttggaaggagatgaacagcgtgaacctgaagcaaaacattctgccgacccgtgaacgtgcgagcctgattctgaccaaaagtgcaaaccacatcgtggaggaagttcgtctgcgtaag

SEQ ID NO: 468 - protein, 326 aa, Artificial Sequence
  Engineered variant of Pantothenate Kinase from Escherichia coli
MHHHHHHGGSGSIKEQTEMTPYLQLTRNQWAAVRSSNPMTLSEDEIARLKGINEDLSLEEVAEVYLPLSRVLNFYISSALRRQAQLEQFLGTNGQRIPYIISVAGSVAVGKSTFARVLQTLLSRWSEHRRVEHISTDGFLLPNQVLKERGLMGKKGFPESYDMHRLMKFVKDLKSGVPNVTAPVYSHLIYDVIHDGDRTVVQPDILILEGLNVLQSGMDYPHDPHHVFVSDFVDFSIYVDAPEDLLQTWYINRFLKLREGAFTDPDSYFHGYAKLTKEEAIKTAMTIWKEMNSVNLKQNILPTRERASLILTKSANHIVEEVRLRK

SEQ ID NO: 469 - DNA, 978 bp, Artificial Sequence
  Engineered variant of Pantothenate Kinase from Escherichia coli
atgcaccatcatcatcatcatggcggtagcggcagcatcaaagagcaggttgagatgaccccgtacctgcaactggaccgtaaccaatgggcggcggtggccgatagtaacccgatgaccctgagcgaggacgaaatcgcgcgtctgaagggtattaacgaagatctgagcctggaggaagtggcggaagtctacctgccgctgagccgtgttctgaacttctatattagcagcaacctgcgtcgtcaggcgcagctggaacagtttctgggtaccaatggccagcgtatcccgtatatcattagcgttgcgggtagcgtggcggttggcaaaagcacctttgcgcgtgtgctgcaggcgctgctgagccgttggccggagcatcgtcgtgttgaacatatcagcaccgacggcttcctgctgccgaaccaagtgctgaaggagcgtggtctgatggggaaaaagggtttcccggaaagctacgatatgcaccgtctgatgaaatttgttaaagacctgaagagcggtgtgccgaacgttaccgcgccggtgtacagccacctgatctatgatgttattccggacggcgataaaaccgtggttcagccggacatcctgattctggagggtctgaacgtgctgcaaagcggcatggactatccgcacgatccgcaccacgtgtttgttagcgacttcgtggattttagcatctacgttgacgcgccggaggatctgctgcagacctggtacattaaccgtttcctgaaactgcgtgagggtgcgttcaccgacccggatagctactttcacgggtatgcgaaactgaccaaggaagaggcgatcaaaaccgcgatgaccatttggaaggagatgaacagcgtgaacctgaagcaaaacattctgccgacccgtgaacgtgcgagcctgattctgaccaaaagtgcaaaccacatcgtggaggaagttcgtctgcgtaag

SEQ ID NO: 470 - protein, 326 aa, Artificial Sequence
  Engineered variant of Pantothenate Kinase from Escherichia coli
MHHHHHHGGSGSIKEQVEMTPYLQLDRNQWAAVADSNPMTLSEDEIARLKGINEDLSLEEVAEVYLPLSRVLNFYISSNLRRQAQLEQFLGTNGQRIPYIISVAGSVAVGKSTFARVLQALLSRWPEHRRVEHISTDGFLLPNQVLKERGLMGKKGFPESYDMHRLMKFVKDLKSGVPNVTAPVYSHLIYDVIPDGDKTVVQPDILILEGLNVLQSGMDYPHDPHHVFVSDFVDFSIYVDAPEDLLQTWYINRFLKLREGAFTDPDSYFHGYAKLTKEEAIKTAMTIWKEMNSVNLKQNILPTRERASLILTKSANHIVEEVRLRK

SEQ ID NO: 471 - DNA, 978 bp, Artificial Sequence
  Engineered variant of Pantothenate Kinase from Escherichia coli
atgcaccatcatcatcatcatggcggtagcggcagcatcaaagagcagaccgagatgaccccgtacctgcaactggatcgtaaccaatggcgtgcgattcgtgacagtaacccgatgaccctgagcgaggacgaaatcgcgcgtctgaagggtattaacgaagatctgagcctggaggaagtggcggaagtctacctgccgctgagccgtgttctgaacttctatgttagcagcgccctgcgtcgtcaggcgcagctggaacagtttctgggtaccaatggtggtcgtatcccgtatatcattagcgttgcgggtagcgtggcggttggcaaaagcacctttgcgcgtgtgctgcaggcgctgctgagccgttggccggagcatcgtcgtgttgaacatatcagcaccgacggcttcctgctgccgaaccaagtgctgaaggagcgtggtctgatggggaaaaagggtttcccggaaagctacgatatgcaccgtctgatgaaatttgttaaagacctgaagagcggtgtgccgaacgttaccgcgccggtgtacagccacctgatctatgatgttattcctgacggcgataaaaccgtggttcagccggacatcctgattctggagggtctgaacgtgctgcaaagcggcatggactatccgcacgatccgcaccacgtgtttgttagcgacttcgtggattttagcatctacgttgacgcgccggaggatctgctgcagacctggtacattaaccgtttcctgaaactgcgtgagggtgcgttcaccgacccggatagctactttcacgggtatgcgaaactgaccaaggaagaggcgatcaaaaccgcgatgaccatttggaaggagatgaacagcgtgaacctgaagcaaaacattctgccgacccgtgaacgtgcgagcctgattctgaccaaaagtgcaaaccacatcgtggaggaagttcgtctgcgtaag

SEQ ID NO: 472 - protein, 326 aa, Artificial Sequence
  Engineered variant of Pantothenate Kinase from Escherichia coli
MHHHHHHGGSGSIKEQTEMTPYLQLDRNQWRAIRDSNPMTLSEDEIARLKGINEDLSLEEVAEVYLPLSRVLNFYVSSALRRQAQLEQFLGTNGGRIPYIISVAGSVAVGKSTFARVLQALLSRWPEHRRVEHISTDGFLLPNQVLKERGLMGKKGFPESYDMHRLMKFVKDLKSGVPNVTAPVYSHLIYDVIPDGDKTVVQPDILILEGLNVLQSGMDYPHDPHHVFVSDFVDFSIYVDAPEDLLQTWYINRFLKLREGAFTDPDSYFHGYAKLTKEEAIKTAMTIWKEMNSVNLKQNILPTRERASLILTKSANHIVEEVRLRK

SEQ ID NO: 473 - DNA, 978 bp, Artificial Sequence
  Engineered variant of Pantothenate Kinase from Escherichia coli
atgcaccatcatcatcatcatggcggtagcggcagcatcaaagagcagaccgagatgaccccgtacctgcaactgacgcgtaaccaatgggccgcgattcgtgacagtaacccgatgaccctgagcgaggacgaaatcgcgcgtctgaagggtattaacgaagatctgagcctggaggaagtggcggaagtctacctgccgctgagccgtgttctgaacttctatattagcagcaacctgcgtcgtcaggcgcagctggaacagtttctgggtaccaatagtcagcgtatcccgtatatcattagcgttgcgggtagcgtggcggttggcaaaagcacctttgcgcgtgtgctgcaggcgctgctgagccgttggccggagcatcgtcgtgttgaacatatcagcaccgacggcttcctgctgccgaaccaagtgctgaaggagcgtggtctgatggggaaaaagggtttcccggaaagctacgatatgcaccgtctgatgaaatttgttaaagacctgaagagcggtgtgccgaacgttaccgcgccggtgtacagccacctgatctatgatgttattccggacggcgataaaaccgtggttcagccggacatcctgattctggagggtctgaacgtgctgcaaagcggcatggactatccgcacgatccgcaccacgtgtttgttagcgacttcgtggattttagcatctacgttgacgcgccggaggatctgctgcagacctggtacattaaccgtttcctgaaactgcgtgagggtgcgttcaccgacccggatagctactttcacgggtatgcgaaactgaccaaggaagaggcgatcaaaaccgcgatgaccatttggaaggagatgaacctggtgaacctgaagcaaaacattctgccgacccgtgaacgtgcgagcctgattctgaccaaaagtgcaaaccacatcgtggaggaagttcgtctgcgtaag

SEQ ID NO: 474 - protein, 326 aa, Artificial Sequence
  Engineered variant of Pantothenate Kinase from Escherichia coli
MHHHHHHGGSGSIKEQTEMTPYLQLTRNQWAAIRDSNPMTLSEDEIARLKGINEDLSLEEVAEVYLPLSRVLNFYISSNLRRQAQLEQFLGTNSQRIPYIISVAGSVAVGKSTFARVLQALLSRWPEHRRVEHISTDGFLLPNQVLKERGLMGKKGFPESYDMHRLMKFVKDLKSGVPNVTAPVYSHLIYDVIPDGDKTVVQPDILILEGLNVLQSGMDYPHDPHHVFVSDFVDFSIYVDAPEDLLQTWYINRFLKLREGAFTDPDSYFHGYAKLTKEEAIKTAMTIWKEMNLVNLKQNILPTRERASLILTKSANHIVEEVRLRK

SEQ ID NO: 475 - DNA, 978 bp, Artificial Sequence
  Engineered variant of Pantothenate Kinase from Escherichia coli
atgcaccatcatcatcatcatggcggtagcggcagcatcaaagagcagaccgagatgaccccgtacctgcaactggaccgtaaccaatgggcggcggtgcgtcgcagtaacccgatgaccctgagcgaggacgaaatcgcgcgtctgaagggtattaacgaagatctgagcctggaggaagtggcggaagtctacctgccgctgagccgtgttctgaacttctatattagcagcaacctgcgtcgtcaggcgcagctggaacagtttctgggtaccaatggccagcgtatcccgtatatcattagcgttgcgggtagcgtggcggttggcaaaagcacctttgcgcgtgtgctgcaggcgctgctgagccgttggccggagcatcgtcgtgttgaacatatcagcaccgacggcttcctgctgccgaaccaagtgctgaaggagcgtggtctgatggggaaaaagggtttcccggaaagctacgatatgcaccgtctgatgaaatttgttaaagacctgaagagcggtgtgccgaacgttaccgcgccggtgtacagccacctgatctatgatgttattccggacggcgataaaaccgtggttcagccggacatcctgattctggagggtctgaacgtgctgcaaagcggcatggactatccgcacgatccgcatcacgtgtttgttagcgacttcgtggattttagcatctacgttgacgcgccggaggatctgctgcagacctggtacattaaccgtttcctgaaactgcgtgagggtgcgttcaccgacccggatagctactttcacgggtatgcggcactgaccaaggaagaggcgatcaaaaccgcgatgaccatttggaaggagatgaacagcgtgaacctgaagcaaaacattctgccgacccgtgaacgtgcgagcctgattctgaccaaaagtgcaaaccacatcgtggaggaagttcgtctgcgtaag

SEQ ID NO: 476 - protein, 326 aa, Artificial Sequence
  Engineered variant of Pantothenate Kinase from Escherichia coli
MHHHHHHGGSGSIKEQTEMTPYLQLDRNQWAAVRRSNPMTLSEDEIARLKGINEDLSLEEVAEVYLPLSRVLNFYISSNLRRQAQLEQFLGTNGQRIPYIISVAGSVAVGKSTFARVLQALLSRWPEHRRVEHISTDGFLLPNQVLKERGLMGKKGFPESYDMHRLMKFVKDLKSGVPNVTAPVYSHLIYDVIPDGDKTVVQPDILILEGLNVLQSGMDYPHDPHHVFVSDFVDFSIYVDAPEDLLQTWYINRFLKLREGAFTDPDSYFHGYAALTKEEAIKTAMTIWKEMNSVNLKQNILPTRERASLILTKSANHIVEEVRLRK

SEQ ID NO: 477 - DNA, 978 bp, Artificial Sequence
  Engineered variant of Pantothenate Kinase from Escherichia coli
atgcaccatcatcatcatcatggcggtagcggcagcatcaaagagcagaccgagatgaccccgtacctgcaactggaccgtaaccaatgggcggcggtgcgtcgcagtaacccgatgaccctgagcgaggacgaaatcgcgcgtctgaagggtattaacgaagatctgagcctggaggaagtggcggaagtctacctgccgctgagccgtgttctgaacttctatattagcagcaacctgcgtcgtcaggcgagtctggaacagtttctgggtaccaatggccagcgtatcccgtatatcattagcgttgcgggtagcgtggcggttggcaaaagcacctttgcgcgtgtgctgcaggcgctgctgagccgttggccggagcatcgtcgtgttgaacatatcagcaccgacggcttcctgctgccgaaccaagtgctgaaggagcgtggtctgatggggaaaaagggtttcccggaaagctacgatatgcaccgtctgatgaaatttgttaaagacctgaagagcggtgtgccgaacgttaccgcgccggtgtacagccacctgatctatgatgttattccggacggcgataaaaccgtggttcagccggacatcctgattctggagggtctgaacgtgctgcaaagcggcatggactatccgcacgatccgcatcacgtgtttgttagcgacttcgtggattttagcatctacgttgacgcgccggaggatctgctgcagacctggtacattaaccgtttcctgaaactgcgtgagggtgcgttcaccgacccggatagctactttcacgggtatgcgaaactgaccaaggaagaggcgatcaaaaccgcgatgaccatttggaaggagatgaacagcgtgaacctgaagcaaaacattctgccgacccgtgaacgtgcgtcgctgattttgaccaaaagtgcaaaccacatcgtggaggaagttcgtctgcgtaag

SEQ ID NO: 478 - protein, 326 aa, Artificial Sequence
  Engineered variant of Pantothenate Kinase from Escherichia coli
MHHHHHHGGSGSIKEQTEMTPYLQLDRNQWAAVRRSNPMTLSEDEIARLKGINEDLSLEEVAEVYLPLSRVLNFYISSNLRRQASLEQFLGTNGQRIPYIISVAGSVAVGKSTFARVLQALLSRWPEHRRVEHISTDGFLLPNQVLKERGLMGKKGFPESYDMHRLMKFVKDLKSGVPNVTAPVYSHLIYDVIPDGDKTVVQPDILILEGLNVLQSGMDYPHDPHHVFVSDFVDFSIYVDAPEDLLQTWYINRFLKLREGAFTDPDSYFHGYAKLTKEEAIKTAMTIWKEMNSVNLKQNILPTRERASLILTKSANHIVEEVRLRK

SEQ ID NO: 479 - DNA, 978 bp, Artificial Sequence
  Engineered variant of Pantothenate Kinase from Escherichia coli
atgcaccatcatcatcatcatggcggtagcggcagcatcaaagagcagaccgagatgactccgtacctgcaactggaccgtaaccaatgggcggcggtgcgtgatagtaacccgatgaccctgagcgaggacgaaatcgcgcgtctgaagggtattaacgaagatctgagcctggaggaagtggcggaagtctacctgccgctgagccgtgttctgaacttctatattagcagcaacctgcgtcgtcaggcgcagctggaacagtttctgggtaccaatggccagcgtatcccgtatatcattagcgttgcgggtagcgtggcggttggcaaaagcacctttgcgcgtgtgctgcaggttctgctgagccgttggccggagcatcgtcgtgttgaacatatcagcaccgacggcttcctgctgccgaaccaagtgctgaaggagcgtggtctgatggggaaaaagggtttcccggaaagctacgatatgcaccgtctgatgaaatttgttaaagacctgaagagcggtgtgccgaacgttaccgcgccggtgtacagccacctgatctatgatgttattccggacggcgataaaaccgtggttcagccggacatcctgattctggagggtctgaacgtgctgcaaagcggcatggactatccgcacgatccgcaccacgtgttcgttagcgacttcgtggattttagcatctacgttgacgcgccggaggatctgctgcagacctggtacattaaccgtttcctgaaactgcgtgagggtgcgttcaccgacccggatagctactttcacgggtatgcgaaactgaccaaggaagaggcgatcaagaccgcgatgaccatttggaaggagatgaacagcgtgaacctgaagcaaaacattctgccgacccgtgaacgtgcgagcctgattctgaccaaaagtgcaaaccacatcgtggaggaagttcgtctgcgtaag

SEQ ID NO: 480 - protein, 326 aa, Artificial Sequence
  Engineered variant of Pantothenate Kinase from Escherichia coli
MHHHHHHGGSGSIKEQTEMTPYLQLDRNQWAAVRDSNPMTLSEDEIARLKGINEDLSLEEVAEVYLPLSRVLNFYISSNLRRQAQLEQFLGTNGQRIPYIISVAGSVAVGKSTFARVLQVLLSRWPEHRRVEHISTDGFLLPNQVLKERGLMGKKGFPESYDMHRLMKFVKDLKSGVPNVTAPVYSHLIYDVIPDGDKTVVQPDILILEGLNVLQSGMDYPHDPHHVFVSDFVDFSIYVDAPEDLLQTWYINRFLKLREGAFTDPDSYFHGYAKLTKEEAIKTAMTIWKEMNSVNLKQNILPTRERASLILTKSANHIVEEVRLRK

SEQ ID NO: 481 - DNA, 978 bp, Artificial Sequence
  Engineered variant of Pantothenate Kinase from Escherichia coli
atgcaccatcatcatcatcatggcggtagcggcagcatcaaagagcagaccgagatgaccccgtacctgcaactgacgcgtaaccaatggcgtgcgattcgtagtagtaacccgatgaccctgagcgaggacgaaatcgcgcgtctgaagggtattaacgaagatctgagcctggaggaagtggcggaagtctacctgccgctgagccgtgttctgaacttctatattagcagcaacctgcgtcgtcaggcgcagctggaacagtttctgggtaccaatggccagcgtatcccgtatatcattagcgttgcgggtagcgtggcggttggcaaaagcacctttgcgcgtgtgctgcagacgctgctgagccgttggccggagcatcgtcgtgttgaacatatcagcaccgacggcttcctgcacccgaaccaagtgctgaaggagcgtggtctgatggggaaaaagggtttcccggaaagctacgatatgcaccgtctgatgaaatttgttaaagacctgaagagcggtgtgccgaacgttaccgcgccggtgtacagccacctgatctatgatgttattccggacggcgataaaaccgtggttcagccggacatcctgattctggagggtctgaacgtgctgcaaagcggcatggactatccgcacgatccgcaccacgtgtttgttagcgacttcgtggattttagcatctacgttgacgcgccggaggatctgctgcagacctggtacattaaccgtttcctgaaactgcgtgagggtgcgttcaccgacccggatagctactttcacgggtatgcgaaactgaccaaggaagaggcgatcaaaaccgcgatgaccatttggaaggagatgaacctggtgaacctgaagcaaaacattctgccgacccgtgaacgtgcgagcctgattctgaccaaaagtgcaaaccacatcgtggaggaagttcgtctgcgtaag

SEQ ID NO: 482 - protein, 326 aa, Artificial Sequence
  Engineered variant of Pantothenate Kinase from Escherichia coli
MHHHHHHGGSGSIKEQTEMTPYLQLTRNQWRAIRSSNPMTLSEDEIARLKGINEDLSLEEVAEVYLPLSRVLNFYISSNLRRQAQLEQFLGTNGQRIPYIISVAGSVAVGKSTFARVLQTLLSRWPEHRRVEHISTDGFLHPNQVLKERGLMGKKGFPESYDMHRLMKFVKDLKSGVPNVTAPVYSHLIYDVIPDGDKTVVQPDILILEGLNVLQSGMDYPHDPHHVFVSDFVDFSIYVDAPEDLLQTWYINRFLKLREGAFTDPDSYFHGYAKLTKEEAIKTAMTIWKEMNLVNLKQNILPTRERASLILTKSANHIVEEVRLRK

SEQ ID NO: 483 - DNA, 978 bp, Artificial Sequence
  Engineered variant of Pantothenate Kinase from Escherichia coli
atgcaccatcatcatcatcatggcggtagcggcagcatcaaagagcagaccgagatgaccccgtacctgcaactggaccgtaaccaatgggccgcggttcgtagtagtaacccgatgaccctgagcgaggacgaaatcgcgcgtctgaagggtattaacgaagatctgagcctggaggaagtggcggaagtctacctgccgctgagccgtgttctgaacttctatgttagcagcgccgagcgtcgtcaggcgcagctggaacagtttctgggtaccaatggtcagcgtatcccgtatatcattagcgttgcgggtagcgtggcggttggcaaaagcacctttgcgcgtgtgctgcaggcgctgctgagccgttggtcggagcatcgtcgtgttgaacatatcagcaccgacggcttcctgctgccgaaccaagtgctgaaggagcgtggtctgatggggaaaaagggtttcccggaaagctacgatatgcaccgtctgatgaaatttgttaaagacctgaagagcggtgtgccgaacgttaccgcgccggtgtacagccacctgatctatgatgttattccggacggcgataaaaccgtggttcagccggacatcctgattctggagggtctgaacgtgctgcaaagcggcatggactatccgcacgatccgcaccacgtgtttgttagcgacttcgtggattttagcatctacgttgacgcgccggaggatctgctgcagacctggtacattaaccgtttcctgaaactgcgtgagggtgcgttcaccgacccggatagctactttcacgggtatgcgaaactgaccaaggaagaggcgatcaaaaccgcgatgaccatttggaaggagatgaacagcgtgaacctgaagcaaaacattctgccgacccgtgaacgtgcgagcctgattctgaccaaaagtgcgaaccacatcgtggaggaagttcgtctgcgtaag

SEQ ID NO: 484 - protein, 326 aa, Artificial Sequence
  Engineered variant of Pantothenate Kinase from Escherichia coli
MHHHHHHGGSGSIKEQTEMTPYLQLDRNQWAAVRSSNPMTLSEDEIARLKGINEDLSLEEVAEVYLPLSRVLNFYVSSAERRQAQLEQFLGTNGQRIPYIISVAGSVAVGKSTFARVLQALLSRWSEHRRVEHISTDGFLLPNQVLKERGLMGKKGFPESYDMHRLMKFVKDLKSGVPNVTAPVYSHLIYDVIPDGDKTVVQPDILILEGLNVLQSGMDYPHDPHHVFVSDFVDFSIYVDAPEDLLQTWYINRFLKLREGAFTDPDSYFHGYAKLTKEEAIKTAMTIWKEMNSVNLKQNILPTRERASLILTKSANHIVEEVRLRK

SEQ ID NO: 485 - DNA, 978 bp, Artificial Sequence
  Engineered variant of Pantothenate Kinase from Escherichia coli
atgcaccatcatcatcatcatggcggtagcggcagcatcaaagagcagaccgagctgaccccgtacctgcaactggaccgtaaccaatgggcggcggtgcgtgatagtaacccgatgaccctgagcgaggacgaaatcgcgcgtctgaagggtattaacgaagatctgagcctggaggaagtggcggaagtctacctgccgctgagccgtgttctgaacctgtatattctgagcaacctgcgtcgtcaggcgcagctggaacagtttctgggtaccaatggccagcgtatcccgtatatcattagcgttgcgggtagcgtggcggttggcaaaagcacctttgcgcgtgtgctgcaggcgctgctgagccgttggccggagcatcgtcgtgttgaacatatcagcaccgacggcttcctgcacccgaaccaagtgctgaaggagcgtggtctgatggggaaaaagggtttcccggaaagctacgatatgcaccgtctgatgaaatttgttaaagacctgaagagcggtgtgccgaacgttaccgcgccggtgtacagccacctgatctatgatgttattccggacggcgataaaaccgtggttcagccggacatcctgattctggagggtctgaacgtgctgcaaagcggctgcgactatccgcacgatccgcatcacgtgtttgttagcgacttcgtggattttagcatctacgttgacgcgccggaggatctgctgcagacctggtacattaaccgtttcctgaaactgcgtgagggtgcgttcaccgacccggatagctactttcacgggtatgcgaaactgaccaaggaagaggcgatcaaaaccgcgatgaccatttggaaggagatgaacagcgtgaacctgaagcaaaacattctgccgacccgtgaacgtgcgagcctgattctgaccaaaagtgcaaaccacatcgtggaggaagttcgtctgcgtaag

SEQ ID NO: 486 - protein, 326 aa, Artificial Sequence
  Engineered variant of Pantothenate Kinase from Escherichia coli
MHHHHHHGGSGSIKEQTELTPYLQLDRNQWAAVRDSNPMTLSEDEIARLKGINEDLSLEEVAEVYLPLSRVLNLYILSNLRRQAQLEQFLGTNGQRIPYIISVAGSVAVGKSTFARVLQALLSRWPEHRRVEHISTDGFLHPNQVLKERGLMGKKGFPESYDMHRLMKFVKDLKSGVPNVTAPVYSHLIYDVIPDGDKTVVQPDILILEGLNVLQSGCDYPHDPHHVFVSDFVDFSIYVDAPEDLLQTWYINRFLKLREGAFTDPDSYFHGYAKLTKEEAIKTAMTIWKEMNSVNLKQNILPTRERASLILTKSANHIVEEVRLRK

SEQ ID NO: 487 - DNA, 978 bp, Artificial Sequence
  Engineered variant of Pantothenate Kinase from Escherichia coli
atgcaccatcatcatcatcatggcggtagcggcagcatcaaagagcagaccgagatgaccccgtacctgcaactggaccgtaaccaatgggcggcggtgcgtgatagtaacccgatgaccctgagcgaggacgaaatcgcgcgtctgaagggtattaacgaagatctgagcctggaggaagtggcggaagtctacctgccgctgagccgtgttctgaacttctatattctgagcaacctgcgtcgtcaggcgagtctggaacagtttctgggtaccaatggccagcgtatcccgtatatcattagcgttgcgggtagcgtggcggttggcaaaagcacctttgcgcgtgtgctgcaggcgctgctgagccgttggccggagcatcgtcgtgttgaacatatcagcaccgacggcttcctgctgccgaaccaaatcctgaaggagcgtggtctgatggggaaaaagggtttcccggaaagctacgatatgcaccgtctgatgaaatttgttaaagacctgaagagcggtgtgccgaacgttaccgcgccggtgtacagccacctgatctatgatgttattccggacggcgataaaaccgtggttcagccggacatcctgattctggagggtctgaacgtgctgcaaagcggcatggactatccgcacgatccgcaccacgtgtttgttagcgacttcgtggattttagcatctacgttgacgcgccggaggatctgctgcagacctggtacattaaccgtttcctgaaactgcgtgagggtgcgttcaccgacccggatagctactttcacgggtatgcgaagctgaccaaggaagaggcgatcaaaaccgcgatgaccatttggaaggagatgaacagcgtgaacctgaagcaaaacattctgccgacccgtgaacgtgcgagcctgattctgaccaaaagtgcaaaccacatcgtggaggaagttcgtctgcgtaag

SEQ ID NO: 488 - protein, 326 aa, Artificial Sequence
  Engineered variant of Pantothenate Kinase from Escherichia coli
MHHHHHHGGSGSIKEQTEMTPYLQLDRNQWAAVRDSNPMTLSEDEIARLKGINEDLSLEEVAEVYLPLSRVLNFYILSNLRRQASLEQFLGTNGQRIPYIISVAGSVAVGKSTFARVLQALLSRWPEHRRVEHISTDGFLLPNQILKERGLMGKKGFPESYDMHRLMKFVKDLKSGVPNVTAPVYSHLIYDVIPDGDKTVVQPDILILEGLNVLQSGMDYPHDPHHVFVSDFVDFSIYVDAPEDLLQTWYINRFLKLREGAFTDPDSYFHGYAKLTKEEAIKTAMTIWKEMNSVNLKQNILPTRERASLILTKSANHIVEEVRLRK

SEQ ID NO: 489 - DNA, 978 bp, Artificial Sequence
  Engineered variant of Pantothenate Kinase from Escherichia coli
atgcaccatcatcatcatcatggcggtagcggcagcatcaaagagcagaccgagatgaccccgtacctgcaactgacgcgtaaccaatgggccgcggttcgtagtagtaacccgatgaccctgagcgaggacgaaatcgcgcgtctgaagggtattaacgaagatctgagcctggaggaagtggcggaagtctacctgccgctgagccgtgttctgaacttctatattagcagcaacctgcgtcgtcaggcgcagctggaacagtttctgggtaccaatggtcagcgtatcccgtatatcattagcgttgcgggtagcgtggcggttggcaaaagcacctttgcgcgtgtgctgcaggcgctgctgagccgttggtcggagcatcgtcgtgttgaacatatcagcaccgacggcttcctgctgccgaaccaagtgctgaaggagcgtggtctgatggggaaaaagggtttcccggaaagctacgatatgcaccgtctgatgaaatttgttaaagacctgaagagcggtgtgccgaacgttaccgcgccggtgtacagccacctgatctatgatgttattccggacggcgataaaaccgtggttcagccggacatcctgattctggagggtctgaacgtgctgcaaagcggcatggactatccgcacgatccgcaccacgtatttgttagcgacttcgtggattttagcatctacgttgacgcgccggaggatctgctgcagacctggtacattaaccgtttcctgaaactgcgtgagggtgcgttcaccgacccggatagctactttcacgggtatgcgaaactgaccaaggaagaggcgatcaaaaccgcgatgaccatttggaaggagatgaacagcgtgaacctgaagcaaaacattctgccgacccgtgaacgtgcgagcctgattctgaccaaaagtgcaaaccacatcgtggaggaagttcgtctgcgtaag

SEQ ID NO: 490 - protein, 326 aa, Artificial Sequence
  Engineered variant of Pantothenate Kinase from Escherichia coli
MHHHHHHGGSGSIKEQTEMTPYLQLTRNQWAAVRSSNPMTLSEDEIARLKGINEDLSLEEVAEVYLPLSRVLNFYISSNLRRQAQLEQFLGTNGQRIPYIISVAGSVAVGKSTFARVLQALLSRWSEHRRVEHISTDGFLLPNQVLKERGLMGKKGFPESYDMHRLMKFVKDLKSGVPNVTAPVYSHLIYDVIPDGDKTVVQPDILILEGLNVLQSGMDYPHDPHHVFVSDFVDFSIYVDAPEDLLQTWYINRFLKLREGAFTDPDSYFHGYAKLTKEEAIKTAMTIWKEMNSVNLKQNILPTRERASLILTKSANHIVEEVRLRK

SEQ ID NO: 491 - DNA, 978 bp, Artificial Sequence
  Engineered variant of Pantothenate Kinase from Escherichia coli
atgcaccatcatcatcatcatggcggtagcggcagcatcaaagagcagaccgagatgaccccgtacctgcaactggatcgtaaccaatgggccgcgattcgtagtagtaacccgatgaccctgagcgaggacgaaatcgcgcgtctgaagggtattaacgaagatctgagcctggaggaagtggcggaagtctacctgccgctgagccgtgttctgaacttctatattagcagcaacctgcgtcgtcaggcgcagctggaacagtttctgggtaccaatagtcagcgtatcccgtatatcattagcgttgcgggtagcgtggcggttggcaaaagcacctttgcgcgtgtgctgcaggcgctgctgagccgttggtcggagcatcgtcgtgttgaacatatcagcaccgacggcttcctgcacccgaaccaagtgctgaaggagcgtggtctgatggggaaaaagggtttcccggaaagctacgatatgcaccgtctgatgaaatttgttaaagacctgaagagcggtgtgccgaacgttaccgcgccggtgtacagccacctgatctatgatgttattcctgacggcgataaaaccgtggttcagccggacatcctgattctggagggtctgaacgtgctgcaaagcggcatggactatccgcacgatccgcaccacgtgtttgttagcgacttcgtggattttagcatctacgttgacgcgccggaggatctgctgcagacctggtacattaaccgtttcctgaaactgcgtgagggtgcgttcaccgacccggatagctactttcacgggtatgcgaaactgaccaaggaagaggcgatcaaaaccgcgatgaccatttggaaggagatgaacagcgtgaacctgaagcaaaacattctgccgacccgtgaacgtgcgagcctgattctgaccaaaagtgcaaaccacatcgtggaggaagttcgtctgcgtaag

SEQ ID NO: 492 - protein, 326 aa, Artificial Sequence
  Engineered variant of Pantothenate Kinase from Escherichia coli
MHHHHHHGGSGSIKEQTEMTPYLQLDRNQWAAIRSSNPMTLSEDEIARLKGINEDLSLEEVAEVYLPLSRVLNFYISSNLRRQAQLEQFLGTNSQRIPYIISVAGSVAVGKSTFARVLQALLSRWSEHRRVEHISTDGFLHPNQVLKERGLMGKKGFPESYDMHRLMKFVKDLKSGVPNVTAPVYSHLIYDVIPDGDKTVVQPDILILEGLNVLQSGMDYPHDPHHVFVSDFVDFSIYVDAPEDLLQTWYINRFLKLREGAFTDPDSYFHGYAKLTKEEAIKTAMTIWKEMNSVNLKQNILPTRERASLILTKSANHIVEEVRLRK

SEQ ID NO: 493 - DNA, 978 bp, Artificial Sequence
  Engineered variant of Pantothenate Kinase from Escherichia coli
atgcaccatcatcatcatcatggcggtagcggcagcatcaaagagcagaccgagctgaccccgtacctgcaactggaccgtaaccaatgggcggcggtgcgtgatagtaacccgatgaccctgagcgaggacgaaatcgcgcgtctgaagggtattaacgaagatctgagcctggaggaagtggcggaagtctacctgccgctgagccgtgttctgaacttctatattagcagcaacctgcgtcgtcaggcgcagctggaacagtttctgggtaccaatggccagcgtatcccgtatatcattagcgttgcgggtagcgtggcggttggcaaaagcacctttgcgcgtgtgctgcaggcgctgctgagccgttggccggagcatcgtcgtgttgaacatatcagcaccgacggcttcctgctgccgaaccaagtgctgaaggagcgtggtctgatggggaaaaagggtttcccggaaagctacgatatgcaccgtctgatgaaatttgttaaagacctgaagagcggtgtgccgaacgttaccgcgccggtgtacagccacctgatctatgatgttattccggacggcgataaaaccgtggttcagccggacatcctgattctggagggtctgaacgtgctgcaaagcggcatggactatccgcacgatccgcaccacgtgtttgttagcgacttcgtggattttagcatctacgttgacgcgccggaggatctgctgcagacctggtacattaaccgtttcctgaaactgcgtgagggtgcgttcaccgacccggatagctactttcacgggtatgcgaagctgaccaaggaagaggcgatcaaaaccgcgatgaccatttggaaggagatgaacagcgtgaacctgaagcaaaacattctgccgacccgtgaacgtgcgagcctgattctgaccaaaagtgcaaaccacatcgtggaggaagttcgtctgcgtaag

SEQ ID NO: 494 - protein, 326 aa, Artificial Sequence
  Engineered variant of Pantothenate Kinase from Escherichia coli
MHHHHHHGGSGSIKEQTELTPYLQLDRNQWAAVRDSNPMTLSEDEIARLKGINEDLSLEEVAEVYLPLSRVLNFYISSNLRRQAQLEQFLGTNGQRIPYIISVAGSVAVGKSTFARVLQALLSRWPEHRRVEHISTDGFLLPNQVLKERGLMGKKGFPESYDMHRLMKFVKDLKSGVPNVTAPVYSHLIYDVIPDGDKTVVQPDILILEGLNVLQSGMDYPHDPHHVFVSDFVDFSIYVDAPEDLLQTWYINRFLKLREGAFTDPDSYFHGYAKLTKEEAIKTAMTIWKEMNSVNLKQNILPTRERASLILTKSANHIVEEVRLRK

SEQ ID NO: 495 - DNA, 978 bp, Artificial Sequence
  Engineered variant of Pantothenate Kinase from Escherichia coli
atgcaccatcatcatcatcatggcggtagcggcagcatcaaagagcagaccgagatgaccccgtacctgcaactggatcgtaaccaatgggccgcgattcgtagtagtaacccgatgaccctgagcgaggacgaaatcgcgcgtctgaagggtattaacgaagatctgagcctggaggaagtggcggaagtctacctgccgctgagccgtgttctgaacttctatgttagcagcaacgagcgtcgtcaggcgcagctggaacagtttctgggtaccaatggccagcgtatcccgtatatcattagcgttgcgggtagcgtggcggttggcaaaagcacctttgcgcgtgtgctgcaggcgctgctgagccgttggccggagcatcgtcgtgttgaacatatcagcaccgacggcttcctgctgccgaaccaagtgctgaaggagcgtggtctgatggggaaaaagggtttcccggaaagctacgatatgcaccgtctgatgaaatttgttaaagacctgaagagcggtgtgccgaacgttaccgcgccggtgtacagccacctgatctatgatgttattccggacggcgataaaaccgtggttcagccggacatcctgattctggagggtctgaacgtgctgcaaagcggcatggactatccgcacgatccgcaccacgtatttgttagcgacttcgtggattttagcatctacgttgacgcgccggaggatctgctgcagacctggtacattaaccgtttcctgaaactgcgtgagggtgcgttcaccgacccggatagctactttcacgggtatgcgaaactgaccaaggaagaggcgatcaaaaccgcgatgaccatttggaaggagatgaacctggtgaacctgaagcaaaacattctgccgacccgtgaacgtgcgagcctgattctgaccaaaagtgcaaaccacatcgtggaggaagttcgtctgcgtaag

SEQ ID NO: 496 - protein, 326 aa, Artificial Sequence
  Engineered variant of Pantothenate Kinase from Escherichia coli
MHHHHHHGGSGSIKEQTEMTPYLQLDRNQWAAIRSSNPMTLSEDEIARLKGINEDLSLEEVAEVYLPLSRVLNFYVSSNERRQAQLEQFLGTNGQRIPYIISVAGSVAVGKSTFARVLQALLSRWPEHRRVEHISTDGFLLPNQVLKERGLMGKKGFPESYDMHRLMKFVKDLKSGVPNVTAPVYSHLIYDVIPDGDKTVVQPDILILEGLNVLQSGMDYPHDPHHVFVSDFVDFSIYVDAPEDLLQTWYINRFLKLREGAFTDPDSYFHGYAKLTKEEAIKTAMTIWKEMNLVNLKQNILPTRERASLILTKSANHIVEEVRLRK

SEQ ID NO: 497 - DNA, 978 bp, Artificial Sequence
  Engineered variant of Pantothenate Kinase from Escherichia coli
atgcaccatcatcatcatcatggcggtagcggcagcatcaaagagcagaccgagatgaccccgtacctgcaactggaccgtaaccaatgggcggcggtggccgatagtaacccgatgaccctgagcgaggacgaaaaagcgtgtctgaagggtattaacgaagatctgagcctggaggaagtggcggaagtctacctgccgctgagccgtgttctgaacttctatattagcagcaacctgcgtcgtcaggcgcagctggaacagtttctgggtaccaatggccagcgtatcccgtatatcattagcgttgcgggtagcgtggcggttggcaaaagcacctttgcgcgtgtgctgcaggcgctgctgagccgttggccggagcatcgtcgtgttgaacatatcagcaccgacggcttcctgctgccgaaccaagtgctgaaggagcgtggtctgatggggaaaaagggtttcccggaaagctacgatatgcaccgtctgatgaaatttgttaaagacctgaagagcggtgtgccgaacgttaccgcgccggtgtacagccacctgatctatgatgttattccggacggcgataaaaccgtggttcagccggacatcctgattctggagggtctgaacgtgctgcaaagcggcatggactatccgcacgatccgcaccacgtgtttgttagcgacttcgtggattttagcatctacgttgacgcgccggaggatctgctgcagacctggtacattaaccgtttcctgaaactgcgtgagggtgcgttcaccgacccggatagctactttcacgggtatgcgaaactgaccaaggaagaggcgattaaaaccgcgatgaccatttggaaggagatgaacagcgtgaacctgaagcaaaacattctgccgacccgtgaacgtgcgagcctgattctgaccaaaagtgcaaaccacatcgtggaggaagttcgtctgcgtaag

SEQ ID NO: 498 - protein, 326 aa, Artificial Sequence
  Engineered variant of Pantothenate Kinase from Escherichia coli
MHHHHHHGGSGSIKEQTEMTPYLQLDRNQWAAVADSNPMTLSEDEKACLKGINEDLSLEEVAEVYLPLSRVLNFYISSNLRRQAQLEQFLGTNGQRIPYIISVAGSVAVGKSTFARVLQALLSRWPEHRRVEHISTDGFLLPNQVLKERGLMGKKGFPESYDMHRLMKFVKDLKSGVPNVTAPVYSHLIYDVIPDGDKTVVQPDILILEGLNVLQSGMDYPHDPHHVFVSDFVDFSIYVDAPEDLLQTWYINRFLKLREGAFTDPDSYFHGYAKLTKEEAIKTAMTIWKEMNSVNLKQNILPTRERASLILTKSANHIVEEVRLRK

SEQ ID NO: 499 - DNA, 978 bp, Artificial Sequence
  Engineered variant of Pantothenate Kinase from Escherichia coli
atgcaccatcatcatcatcatggcggtagcggcagcatcaaagagcagaccgagatgaccccgtacctgcaactggaccgtaaccaatgggcggcggtgcgtgatagtaacccgatgaccctgagcgaggacgaaaaagcgcgtctgaagggtattaacgaagatctgagcctggaggaagtggcggaagtctacctgccgctgagccgtgttctgaacttctatattagcagcaatctgcgtcgtcaggcgcagctggaacagtttctgggtaccaatggccagcgtatcccgtatatcattagcgttgcgggtagcgtggcggttggcaaaagcacctttgcgcgtgtgctgcaggcgctgctgagccgttggccggagcatcgtcgtgttgaacatatcagcaccgacggcttcctgctgccgaaccaagtgctgaaggagcgtggtctgatggggaaaaagggtttcccggaaagctacgatatgcaccgtctgatgaaatttgttaaagacctgaagagcggtgtgccgaacgttaccgcgccggtgtacagccacctgatctatgatgttattccggacggcgataaaaccgtggttcagccggacatcctgattctggagggtctgaacgtgctgcaaagcggcatggactatccgcacgatccgcaccacgtgtttgttagcgacttcgtggattttagcatctacgttgacgcgccggaggatctgctgcagacctggtacattaaccgtttcctgaaactgcgtgagggtgcgttcaccgacccggatagctactttcacgggtatgcgaaactgaccaaggaagaggcgatcaaaaccgcgatgaccatttggaaggagatgaacagcgtgaacctgaagcaaaacattctgccgacccgtgaacgtgcgagcctgattctgaccaaaagtgcaaaccacatcgtggaggaagttcgtctgcgtaag

SEQ ID NO: 500 - protein, 326 aa, Artificial Sequence
  Engineered variant of Pantothenate Kinase from Escherichia coli
MHHHHHHGGSGSIKEQTEMTPYLQLDRNQWAAVRDSNPMTLSEDEKARLKGINEDLSLEEVAEVYLPLSRVLNFYISSNLRRQAQLEQFLGTNGQRIPYIISVAGSVAVGKSTFARVLQALLSRWPEHRRVEHISTDGFLLPNQVLKERGLMGKKGFPESYDMHRLMKFVKDLKSGVPNVTAPVYSHLIYDVIPDGDKTVVQPDILILEGLNVLQSGMDYPHDPHHVFVSDFVDFSIYVDAPEDLLQTWYINRFLKLREGAFTDPDSYFHGYAKLTKEEAIKTAMTIWKEMNSVNLKQNILPTRERASLILTKSANHIVEEVRLRK

SEQ ID NO: 501 - DNA, 978 bp, Artificial Sequence
  Engineered variant of Pantothenate Kinase from Escherichia coli
atgcaccatcatcatcatcatggcggtagcggcagcatcaaagagcagaccgagatgggcccgtacctgcaactggatcgtaaccaatgggccgcgattcgtagtagtaacccgatgaccctgagcgaggacgaaatcgcgcgtctgaagggtattaacgaagatctgagcctggaggaagtggcggaagtctacctgccgctgagccgtgttctgaacttctatattagcagcaacctgcgtcgtcaggcgcagctggaacagtttctgggtaccaatagccagcgtatcccgtatatcattagcgttgcgggtagcgtggcggttggcaaaagcacctttgcgcgtgtgctgcagaccctgctgagccgttggtcggagcatcgtcgtgttgaacatatcagcaccgacggcttcctgctgccgaaccaagtgctgaaggagcgtggtctgatggggaaaaagggtttcccggaaagctacgatatgcaccgtctgatgaaatttgttaaagacctgaagagcggtgtgccgaacgttaccgcgccggtgtacagccacctgatctatgatgttattccggacggcgacaaaaccgtggttcagccggacatcctgattctggagggtctgaacgtgctgcaaagcggcatggactatcctggggatccgcaccacacgtttgttagcgacttcgtggattttagcatctacgttgacgcgccggaggatctgctgcagacctggtacattaaccgtttcctgaaactgcgtgagggtgcgttcaccgacccggatagctactttcacgggtatgcgaaactgaccaaggaagaggcgatcaaaaccgcgatgaccatttggaaggagatgaacagcgtgaacctgaagcaaaacattctgccgacccgtgaacgtgcgagcctgattctgaccaaaagtgcaaaccacatcgtggaggaagttcgtctgcgtaag

SEQ ID NO: 502 - protein, 326 aa, Artificial Sequence
  Engineered variant of Pantothenate Kinase from Escherichia coli
MHHHHHHGGSGSIKEQTEMGPYLQLDRNQWAAIRSSNPMTLSEDEIARLKGINEDLSLEEVAEVYLPLSRVLNFYISSNLRRQAQLEQFLGTNSQRIPYIISVAGSVAVGKSTFARVLQTLLSRWSEHRRVEHISTDGFLLPNQVLKERGLMGKKGFPESYDMHRLMKFVKDLKSGVPNVTAPVYSHLIYDVIPDGDKTVVQPDILILEGLNVLQSGMDYPGDPHHTFVSDFVDFSIYVDAPEDLLQTWYINRFLKLREGAFTDPDSYFHGYAKLTKEEAIKTAMTIWKEMNSVNLKQNILPTRERASLILTKSANHIVEEVRLRK

SEQ ID NO: 503 - DNA, 978 bp, Artificial Sequence
  Engineered variant of Pantothenate Kinase from Escherichia coli
atgcaccatcatcatcatcatggcggtagcggcagcatcaaagagcagaccgagatgaccccgtacctgcaactggatcgtaaccaatgggccgcgattcgtagtagtaacccgatgaccctgagcgaggacgaaatcgcgtgcctgaagggtattaacgaagatctgagcctggaggaagtggcgctggtctacctgccgctgagccgtgttctgaacttctatattagcagcaacctgcgtcgtcaggcgcagctggaacagtttctgggtaccaatggccagcgtatcccgtatatcattagcgttgcgggtagcgtggcggttggcaaaagcacctttgcgcgtgtgctgcaggccctgctgagccgttggtcggagcatcgtcgtgttgaacatatcagcaccgacggcttcctgctgccgaaccaagttctgaaggagcgtggtctgatggggaaaaagggtttcccggaaagctacgatatgcaccgtctgatgaaatttgttaaagacctgaagagcggtgtgccgaacgttaccgcgccggtgtacagccacctgatctatgatgttattccggacggcgataaaaccgtggttcagccggacatcctgattctggagggtctgaacgtgctgcaaagcggcatggactatcctggggatccgcaccacacttttgttagcgacttcgtggattttagcatctacgttgacgcgccggaggatctgctgcagacctggtacattaaccgtttcctgaaactgcgtgagggtgcgttcaccgacccggatagctactttcacgggtatgcgaaactgaccaaggaagaggcgatcaaaaccgcgatgaccatttggaaggagatgaacagcgtgaacctgaagcaaaacattctgccgacccgtgaacgtgcgagcctgattctgaccaaaagtgcaaaccacatcgtggaggaagttcgtctgcgtaag

SEQ ID NO: 504 - protein, 326 aa, Artificial Sequence
  Engineered variant of Pantothenate Kinase from Escherichia coli
MHHHHHHGGSGSIKEQTEMTPYLQLDRNQWAAIRSSNPMTLSEDEIACLKGINEDLSLEEVALVYLPLSRVLNFYISSNLRRQAQLEQFLGTNGQRIPYIISVAGSVAVGKSTFARVLQALLSRWSEHRRVEHISTDGFLLPNQVLKERGLMGKKGFPESYDMHRLMKFVKDLKSGVPNVTAPVYSHLIYDVIPDGDKTVVQPDILILEGLNVLQSGMDYPGDPHHTFVSDFVDFSIYVDAPEDLLQTWYINRFLKLREGAFTDPDSYFHGYAKLTKEEAIKTAMTIWKEMNSVNLKQNILPTRERASLILTKSANHIVEEVRLRK

SEQ ID NO: 505 - DNA, 978 bp, Artificial Sequence
  Engineered variant of Pantothenate Kinase from Escherichia coli
atgcaccatcatcatcatcatggcggtagcggcagcatcaaagagcagaccgagatgggcccgtacctgcaactggatcgtaaccaatgggccgcgattcgtagtagtaacccgatgaccctgagcgaggacgaaatcgcgtgcctgaagggtattaacgaagatctgagcctggaggaagtggcggaagtctacctgccgctgagccgtgttctgaacttctatattagcagcaacctgcgtcgtcaggcgcagctggaacagtttctgggtaccaatggccagcgtatcccgtatatcattagcgttgcgggtagcgtggcggttggcaaaagcacctttgcgcgtgtgctgcaggcgctgctgagccgttggtcggagcatcgtcgtgttgaacatatcagcaccgacggcttcctgctgccgaaccaagtgctgaaggagcgtggtctgatggggaaaaagggtttcccggaaagctacgatatgcaccgtctgatgaaatttgttaaagacctgaagagcggtgtgccgaacgttaccgcgccggtgtacagccacctgatctatgatgttattccggacggcgataaaaccgtggttcagccggacatcctgattctggagggtctgaacgtgctgcaaagcggctgcgactatcctggggatccgcaccacgtgtttgttagcgacttcgtggattttagcatctacgttgacgcgccggaggatctgctgcagacctggtacattaaccgtttcctgaaactgcgtgagggtgcgttcaccgacccggatagctactttcacgggtatgcgaaactgaccaaggaagaggcgatcaaaaccgcgatgaccatttggaaggagatgaacagcgtgaacctgaagcaaaacattctgccgacccgtgaacgtgcgagcctgattctgaccaaaagtgcaaaccacatcgtggaggaagttcgtctgcgtaag

SEQ ID NO: 506 - protein, 326 aa, Artificial Sequence
  Engineered variant of Pantothenate Kinase from Escherichia coli
MHHHHHHGGSGSIKEQTEMGPYLQLDRNQWAAIRSSNPMTLSEDEIACLKGINEDLSLEEVAEVYLPLSRVLNFYISSNLRRQAQLEQFLGTNGQRIPYIISVAGSVAVGKSTFARVLQALLSRWSEHRRVEHISTDGFLLPNQVLKERGLMGKKGFPESYDMHRLMKFVKDLKSGVPNVTAPVYSHLIYDVIPDGDKTVVQPDILILEGLNVLQSGCDYPGDPHHVFVSDFVDFSIYVDAPEDLLQTWYINRFLKLREGAFTDPDSYFHGYAKLTKEEAIKTAMTIWKEMNSVNLKQNILPTRERASLILTKSANHIVEEVRLRK

SEQ ID NO: 507 - DNA, 978 bp, Artificial Sequence
  Engineered variant of Pantothenate Kinase from Escherichia coli
atgcaccatcatcatcatcatggcggtagcggcagcatcaaagagcagaccgagatgaccccgtacctgcaactggatcgtaaccaatgggccgcgattcgtagtagtaacccgatgaccctgagcgaggacgaaatcgcgcgtctgaagggtattaacgaagatctgagcctggaggaagtggcggaagtctacctgccgctgagccgtgttctgaacttctatattagcagcaacctgcgtcgtcaggcgcagctggaacagtttctgggtaccaatagccagcgtatcccgtatatcattagcgttgcgggtagcgtggcggttggcaaaagcacctttgcgcgtgtgctgcagaccctgctgagccgttggtcggagcatcgtcgtgttgaacatatcagcaccgacggcttcctgctgccgaaccaagtgctgaaggagcgtggtctgatggggaaaaagggtttcccggaaagctacgatatgcaccgtctgatgaaatttgttaaagacctgaagagcggtgtgccgaacgttaccgcgccggtgtacagccacctgatctatgatgttattccggacggcgataaaaccgtggttcagccggacatcctgattctggagggtctgaacgtgctgcaaagcggcatggactatcctggggatccgcaccacacttttgttagcgacttcgtggattttagcatctacgttgacgcgccggaggatctgctgcagacctggtacattaaccgtttcctgaaactgcgtgagggtgcgttcaccgacccggatagctactttcacgggtatgcgaaactgaccaaggaagaggcgatcaaaaccgcgatgaccatttggaaggagatgaacagcgtgaacctgaagcaaaacattctgccgacccgtgaacgtgcgagcctgattctgaccaaaagtgcaaaccacatcgtggaggaagttcgtctgcgtaag

SEQ ID NO: 508 - protein, 326 aa, Artificial Sequence
  Engineered variant of Pantothenate Kinase from Escherichia coli
MHHHHHHGGSGSIKEQTEMTPYLQLDRNQWAAIRSSNPMTLSEDEIARLKGINEDLSLEEVAEVYLPLSRVLNFYISSNLRRQAQLEQFLGTNSQRIPYIISVAGSVAVGKSTFARVLQTLLSRWSEHRRVEHISTDGFLLPNQVLKERGLMGKKGFPESYDMHRLMKFVKDLKSGVPNVTAPVYSHLIYDVIPDGDKTVVQPDILILEGLNVLQSGMDYPGDPHHTFVSDFVDFSIYVDAPEDLLQTWYINRFLKLREGAFTDPDSYFHGYAKLTKEEAIKTAMTIWKEMNSVNLKQNILPTRERASLILTKSANHIVEEVRLRK

SEQ ID NO: 509 - DNA, 978 bp, Artificial Sequence
  Engineered variant of Pantothenate Kinase from Escherichia coli
atgcaccatcatcatcatcatggcggtagcggcagcatcaaagagcagaccgagatgggcccgtacctgcaactggatcgtaaccaatggcgcgcgattcgtgatagtaacccgatgaccctgagcgaggacgaaatcgcgtgcctgaagggtattaacgaagatctgagcctggaggaagtggcgctggtctacctgccgctgagccgtgttctgaacctgtatattagcagcaacctgcgtcgtcaggcgcagctggaacagtttctgggtaccaatagccagcgtatcccgtatatcattagcgttgcgggtagcgtggcggttggcaaaagcacctttgcgcgtgtgctgcagaccctgctgagccgttggtcggagcatcgtcgtgttgaacatatcagcaccgacggcttcctgctgccgaaccaagttctgaaggagcgtggtctgatggggaaaaagggtttcccggaaagctacgatatgcctcgtctgatgaaatttgttaaagacctgaagagcggtgtgccgaacgttaccgcgccggtgtacagccacctgatctatgatgttattccggacggcgacaaaaccgtggttcagccggacatcctgattctggagggtctgaacgtgctgcaaagcggcatggactatcctggggatccgcaccacacttttgttagcgacttcgtggattttagcatctacgttgacgcgccggaggatctgctgcagacctggtacattaaccgtttcctgaaactgcgtgagggtgcgttcaccgacccggatagctactttcacgggtatgcgaaactgaccaaggaagaggcgatcaagaccgcgatgaccatttggaaggagatgaacagcgtgaacctgaagcaaaacattctgccgacccgtgaacgtgcgagcctgattctgaccaaaagtgcaaaccacatcgtggaggaagttcgtctgcgtaag

SEQ ID NO: 510 - protein, 326 aa, Artificial Sequence
  Engineered variant of Pantothenate Kinase from Escherichia coli
MHHHHHHGGSGSIKEQTEMGPYLQLDRNQWRAIRDSNPMTLSEDEIACLKGINEDLSLEEVALVYLPLSRVLNLYISSNLRRQAQLEQFLGTNSQRIPYIISVAGSVAVGKSTFARVLQTLLSRWSEHRRVEHISTDGFLLPNQVLKERGLMGKKGFPESYDMPRLMKFVKDLKSGVPNVTAPVYSHLIYDVIPDGDKTVVQPDILILEGLNVLQSGMDYPGDPHHTFVSDFVDFSIYVDAPEDLLQTWYINRFLKLREGAFTDPDSYFHGYAKLTKEEAIKTAMTIWKEMNSVNLKQNILPTRERASLILTKSANHIVEEVRLRK

SEQ ID NO: 511 - DNA, 978 bp, Artificial Sequence
  Engineered variant of Pantothenate Kinase from Escherichia coli
atgcaccatcatcatcatcatggcggtagcggcagcatcaaagagcagaccgagatgaccccgtacctgcaactggatcgtaaccaatgggcagcgattcgttcgagtaacccgatgaccctgagcgaggacgaaatcgcgcgtctgaagggtattaacgaagatctgagcctggaggaagtggcgctggtctacctgccgctgagccgtgttctgaacttctatattagcagcaacctgcgtcgtcaggcgcagctggaacagtttctgggtaccaatggccagcgtatcccgtatatcattagcgttgcgggtagcgtggcggttggcaaaagcacctttgcgcgtgtgctgcaggcgctgctgagccgttggtcggagcatcgtcgtgttgaacatatcagcaccgacggcttcctgctgccgaaccaagttctgaaggagcgtggtctgatggggaaaaagggtttcccggaaagctacgatatgcaccgtctgatgaaatttgttaaagacctgaagagcggtgtgccgaacgttaccgcgccggtgtacagccacctgatctatgatgttattccggacggcgataaaaccgtggttcagccggacatcctgattctggagggtctgaacgtgctgcaaagcggcatggactatcctggggatccgcaccacacgtttgttagcgacttcgtggattttagcatctacgttgacgcgccggaggatctgctgcagacctggtacattaaccgtttcctgaaactgcgtgagggtgcgttcaccgacccggatagctactttcacgggtatgcgaaactgaccaaggaagaggcgatcaaaaccgcgatgaccatttggaaggagatgaacagcgtgaacctgaagcaaaacattctgccgacccgtgaacgtgcgagcctgattctgaccaaaagtgcaaaccacatcgtggaggaagttcgtctgcgtaag

SEQ ID NO: 512 - protein, 326 aa, Artificial Sequence
  Engineered variant of Pantothenate Kinase from Escherichia coli
MHHHHHHGGSGSIKEQTEMTPYLQLDRNQWAAIRSSNPMTLSEDEIARLKGINEDLSLEEVALVYLPLSRVLNFYISSNLRRQAQLEQFLGTNGQRIPYIISVAGSVAVGKSTFARVLQALLSRWSEHRRVEHISTDGFLLPNQVLKERGLMGKKGFPESYDMHRLMKFVKDLKSGVPNVTAPVYSHLIYDVIPDGDKTVVQPDILILEGLNVLQSGMDYPGDPHHTFVSDFVDFSIYVDAPEDLLQTWYINRFLKLREGAFTDPDSYFHGYAKLTKEEAIKTAMTIWKEMNSVNLKQNILPTRERASLILTKSANHIVEEVRLRK

SEQ ID NO: 513 - DNA, 978 bp, Artificial Sequence
  Engineered variant of Pantothenate Kinase from Escherichia coli
atgcaccatcatcatcatcatggcggtagcggcagcatcaaagagcagaccgagatgactccgtacctgcaactggatcgtaaccaatgggccgcgattcgtagtagtaacccgatgaccctgagcgaggacgaaatcgcgcgtctgaagggtattaacgaagatctgagcctggaggaagtggcgctggtctacctgccgctgagccgtgttctgaacttctatattagcagcaacctgcgtcgtcaggcgcagctggaacagtttctgggtaccaatggccagcgtatcccgtatatcattagcgttgcgggtagcgtggcggttggcaaaagcacctttgcgcgtgtgctgcagaccctgctgagccgttggtcggagcatcgtcgtgttgaacatatcagcaccgacggcttcctgctgccgaaccaagtgctgaaggagcgtggtctgatggggaaaaagggtttcccggaaagctacgatatgcaccgtctgatgaaatttgttaaagacctgaagagcggtgtgccgaacgttaccgcgccggtgtacagccacctgatctatgatgttattccggacggcggcaaaaccgtggttcagccggacatcctgattctggagggtctgaacgtgctgcaaagcggctgcgactatcctggggatccgcaccacacgtttgttagcgacttcgtggattttagcatctacgttgacgcgccggaggatctgctgcagacctggtacattaaccgtttcctgaaactgcgtgagggtgcgttcaccgacccggatagctactttcacgggtatgcgaaaatgaccaaggaagaggcgatcaagaccgcgatgaccatttggaaggagatgaacagcgtgaacctgaagcaaaacattctgccgacccgtgaacgtgcgagcctgattctgaccaaaagtgcaaaccacatcgtggaggaagttcgtctgcgtaag

SEQ ID NO: 514 - protein, 326 aa, Artificial Sequence
  Engineered variant of Pantothenate Kinase from Escherichia coli
MHHHHHHGGSGSIKEQTEMTPYLQLDRNQWAAIRSSNPMTLSEDEIARLKGINEDLSLEEVALVYLPLSRVLNFYISSNLRRQAQLEQFLGTNGQRIPYIISVAGSVAVGKSTFARVLQTLLSRWSEHRRVEHISTDGFLLPNQVLKERGLMGKKGFPESYDMHRLMKFVKDLKSGVPNVTAPVYSHLIYDVIPDGGKTVVQPDILILEGLNVLQSGCDYPGDPHHTFVSDFVDFSIYVDAPEDLLQTWYINRFLKLREGAFTDPDSYFHGYAKMTKEEAIKTAMTIWKEMNSVNLKQNILPTRERASLILTKSANHIVEEVRLRK

SEQ ID NO: 515 - DNA, 978 bp, Artificial Sequence
  Engineered variant of Pantothenate Kinase from Escherichia coli
atgcaccatcatcatcatcatggcggtagcggcagcatcaaagagcagaccgagatgaccccgtacctgcaactggatcgtaaccaatgggccgcgattcgtagtagtaacccgatgaccctgagcgaggacgaaatcgcgcgtctgaagggtattaacgaagatctgagcctggaggaagtggcgctggtctacctgccgctgagccgtgttctgaacttctatattagcagcaacctgcgtcgtcaggcgcagctggaacagtttctgggtaccaatggccagcgtatcccgtatatcattagcgttgcgggtagcgtggcggttggcaaaagcacctttgcgcgtgtgctgcaggcgctgctgagccgttggtcggagcatagtcgtgttgaacatatcagcaccgacggcttcctgctgccgaaccaaattctgaaggagcgtggtctgatggggaaaaagggtttcccggaaagctacgatatgcaccgtctgatgaaatttgttaaagacctgaagagcggtgtgccgaacgttaccgcgccggtgtacagccacctgatctatgatgttattccggacggcgacaaaaccgtggttcagccggacatcctgattctggagggtctgaacgtgctgcaaagcggcatggactatcctggggatccgcaccacacttttgttagcgacttcgtggattttagcatctacgttgacgcgccggaggatctgctgcagacctggtacattaaccgtttcctgaaactgcgtgagggtgcgttcaccgacccggatagctactttcacgggtatgcgaaactgaccaaggaagaggcgatcaaaaccgcgatgaccatttggaaggagatgaacagcgtgaacctgaagcaaaacattctgccgacccgtgaacgtgcgagcctgattctgaccaaaagtgcaaaccacatcgtggaggaagttcgtctgcgtaag

SEQ ID NO: 516 - protein, 326 aa, Artificial Sequence
  Engineered variant of Pantothenate Kinase from Escherichia coli
MHHHHHHGGSGSIKEQTEMTPYLQLDRNQWAAIRSSNPMTLSEDEIARLKGINEDLSLEEVALVYLPLSRVLNFYISSNLRRQAQLEQFLGTNGQRIPYIISVAGSVAVGKSTFARVLQALLSRWSEHSRVEHISTDGFLLPNQILKERGLMGKKGFPESYDMHRLMKFVKDLKSGVPNVTAPVYSHLIYDVIPDGDKTVVQPDILILEGLNVLQSGMDYPGDPHHTFVSDFVDFSIYVDAPEDLLQTWYINRFLKLREGAFTDPDSYFHGYAKLTKEEAIKTAMTIWKEMNSVNLKQNILPTRERASLILTKSANHIVEEVRLRK

SEQ ID NO: 517 - DNA, 978 bp, Artificial Sequence
  Engineered variant of Pantothenate Kinase from Escherichia coli
atgcaccatcatcatcatcatggcggtagcggcagcatcaaagagcagaccgagatgactccgtacctgcaactggatcgtaaccaatgggccgcgattcgtagtagtaacccgatgaccctgagcgaggacgaaatcgcgtgcctgaagggtattaacgaagatctgagcctggaggaagtggcgctggtctacctgccgctgagccgtgttctgaacttctatattagcagcaacctgcgtcgtcaggcgcagctggaacagtttctgggtaccaatggccagcgtatcccgtatatcattagcgttgcgggtagcgtggcggttggcaaaagcacctttgcgcgtgtgctgcaggccctgctgagccgttggtcggagcatcgtcgtgttgaacatatcagcaccgacggcttcctgctgccgaaccaaattctgaaggagcgtggtctgatggggaaaaagggtttcccggaaagctacgatatgcaccgtctgatgaaatttgttaaagacctgaagagcggtgtgccgaacgttaccgcgccggtgtacagccacctgatctatgatgttattccggacggcgataaaaccgtggttcagccggacatcctgattctggagggtctgaacgtgctgcaaagcggcatggactatcctggggatccgcaccacacttttgttagcgacttcgtggattttagcatctacgttgacgcgccggaggatctgctgcagacctggtacattaaccgtttcctgaaactgcgtgagggtgcgttcaccgacccggatagctactttcacgggtatgcgaaactgaccaaggaagaggcgatcaaaaccgcgatgaccatttggaaggagatgaacagcgtgaacctgaagcaaaacattctgccgacccgtgaacgtgcgagcctgattctgaccaaaagtgcaaaccacatcgtggaggaagttcgtctgcgtaag

SEQ ID NO: 518 - protein, 326 aa, Artificial Sequence
  Engineered variant of Pantothenate Kinase from Escherichia coli
MHHHHHHGGSGSIKEQTEMTPYLQLDRNQWAAIRSSNPMTLSEDEIACLKGINEDLSLEEVALVYLPLSRVLNFYISSNLRRQAQLEQFLGTNGQRIPYIISVAGSVAVGKSTFARVLQALLSRWSEHRRVEHISTDGFLLPNQILKERGLMGKKGFPESYDMHRLMKFVKDLKSGVPNVTAPVYSHLIYDVIPDGDKTVVQPDILILEGLNVLQSGMDYPGDPHHTFVSDFVDFSIYVDAPEDLLQTWYINRFLKLREGAFTDPDSYFHGYAKLTKEEAIKTAMTIWKEMNSVNLKQNILPTRERASLILTKSANHIVEEVRLRK

SEQ ID NO: 519 - DNA, 978 bp, Artificial Sequence
  Engineered variant of Pantothenate Kinase from Escherichia coli
atgcaccatcatcatcatcatggcggtagcggcagcatcaaagagcagaccgagatgggcccgtacctgcaactggatcgtaaccaatgggccgcgattcgtagtagtaacccgatgaccctgagcgaggacgaaatcgcgcgcctgaagggtattaacgaagatctgagcctggaggaagtggcggaagtctacctgccgctgagccgtgttctgaacttctatattagcagcaacctgcgtcgtcaggcgcagctggaacagtttctgggtaccaatggccagcgtatcccgtatatcattagcgttgcgggtagcgtggcggttggcaaaagcacctttgcgcgtgtgctgcagaccctgctgagccgttggtcggagcatcgtcgtgttgaacatatcagcaccgacggcttcctgctgccgaaccaaattctgaaggagcgtggtctgatggggaaaaagggtttcccggaaagctacgatatgcatcgtctgatgaaatttgttaaagacctgaagagcggtgtgccgaacgttaccgcgccggtgtacagccacctgatctatgatgttattccggacggcggcaaaaccgtggttcagccggacatcctgattctggagggtctgaacgtgctgcaaagcggcatggactatcctggggatccgcaccacgtgtttgttagcgacttcgtggattttagcatctacgttgacgcgccggaggatctgctgcagacctggtacattaaccgtttcctgaaactgcgtgagggtgcgttcaccgacccggatagctactttcacgggtatgcgaaactgaccaaggaagaggcgatcaaaaccgcgatgaccatttggaaggagatgaacagcgtgaacctgaagcaaaacattctgccgacccgtgaacgtgcgagcctgattctgaccaaaagtgcaaaccacatcgtggaggaagttcgtctgcgtaag

SEQ ID NO: 520 - protein, 326 aa, Artificial Sequence
  Engineered variant of Pantothenate Kinase from Escherichia coli
MHHHHHHGGSGSIKEQTEMGPYLQLDRNQWAAIRSSNPMTLSEDEIARLKGINEDLSLEEVAEVYLPLSRVLNFYISSNLRRQAQLEQFLGTNGQRIPYIISVAGSVAVGKSTFARVLQTLLSRWSEHRRVEHISTDGFLLPNQILKERGLMGKKGFPESYDMHRLMKFVKDLKSGVPNVTAPVYSHLIYDVIPDGGKTVVQPDILILEGLNVLQSGMDYPGDPHHVFVSDFVDFSIYVDAPEDLLQTWYINRFLKLREGAFTDPDSYFHGYAKLTKEEAIKTAMTIWKEMNSVNLKQNILPTRERASLILTKSANHIVEEVRLRK

SEQ ID NO: 521 - DNA, 978 bp, Artificial Sequence
  Engineered variant of Pantothenate Kinase from Escherichia coli
atgcaccatcatcatcatcatggcggtagcggcagcatcaaagagcagaccgagatgactccgtacctgcaactggatcgtaaccaatgggccgcgattcgtagtagtaacccgatgaccctgagcgaggacgaaatcgcgtgcctgaagggtattaacgaagatctgagcctggaggaagtggcgctggtctacctgccgctgagccgtgttctgaacctgtatattagcagctcgctgcgtcgtcaggcgcagctggaacagtttctgggtaccaatggccagcgtatcccgtatatcattagcgttgcgggtagcgtggcggttggcaaaagcacctttgcgcgtgtgctgcagaccctgctgagccgttggtcggagcatggtcgtgttgaacatatcagcaccgacggcttcctgctgccgaaccaagtgctgaaggagcgtggtctgatggggaaaaagggtttcccggaaagctacgatatgcatcgtctgatgaaatttgttaaagacctgaagagcggtgtgccgaacgttaccgcgccggtgtacagccacctgatctatgatgttattccggacggcgataaaaccgtggttcagccggacatcctgattctggagggtctgaacgtgctgcaaagcggcatggactatcctggggatccgcaccacgtgtttgttagcgacttcgtggattttagcatctacgttgacgcgccggaggatctgctgcagacctggtacattaaccgtttcctgaaactgcgtgagggtgcgttcaccgacccggatagctactttcacgggtatgcgaaactgaccaaggaagaggcgatcgcaaccgcgatgaccatttggaaggagatgaacagcgtgaacctgaagcaaaacattctgccgacccgtgaacgtgcgagcctgattctgaccaaaagtgcaaaccacatcgtggaggaagttcgtctgcgtaag

SEQ ID NO: 522 - protein, 326 aa, Artificial Sequence
  Engineered variant of Pantothenate Kinase from Escherichia coli
MHHHHHHGGSGSIKEQTEMTPYLQLDRNQWAAIRSSNPMTLSEDEIACLKGINEDLSLEEVALVYLPLSRVLNLYISSSLRRQAQLEQFLGTNGQRIPYIISVAGSVAVGKSTFARVLQTLLSRWSEHGRVEHISTDGFLLPNQVLKERGLMGKKGFPESYDMHRLMKFVKDLKSGVPNVTAPVYSHLIYDVIPDGDKTVVQPDILILEGLNVLQSGMDYPGDPHHVFVSDFVDFSIYVDAPEDLLQTWYINRFLKLREGAFTDPDSYFHGYAKLTKEEAIATAMTIWKEMNSVNLKQNILPTRERASLILTKSANHIVEEVRLRK

SEQ ID NO: 523 - DNA, 978 bp, Artificial Sequence
  Engineered variant of Pantothenate Kinase from Escherichia coli
atgcaccatcatcatcatcatggcggtagcggcagcatcaaagagcagaccgagatgaccccgtacctgcaactggatcgtaaccaatgggccgcgattcgtagtagtaacccgatgaccctgagcgaggacgaaatcgcgcgcctgaagggtattaacgaagatctgagcctggaggaagtggcggaagtctacctgccgctgagccgtgttctgaacctgtatattagcagcgcgctgcgtcgtcaggcgcagctggaacagtttctgggtaccaatagccagcgtatcccgtatatcattagcgttgcgggtagcgtggcggttggcaaaagcacctttgcgcgtgtgctgcaggccctgctgagccgttggtcggagcatcgtcgtgttgaacatatcagcaccgacggcttcctgctgccgaaccaagtgctgaaggagcgtggtctgatggggaaaaagggtttcccggaaagctacgatatgcaccgtctgatgaaatttgttaaagacctgaagagcggtgtgccgaacgttaccgcgccggtgtacagccacctgatctatgatgttattccggacggcgataaaaccgtggttcagccggacatcctgattctggagggtctgaacgtgctgcaaagcggcatggactatcctggggatccgcaccacacttttgttagcgacttcgtggattttagcatctacgttgacgcgccggaggatctgctgcagacctggtacattaaccgtttcctgaaactgcgtgagggtgcgttcaccgacccggatagctactttcacgggtatgcgaaaatgaccaaggaagaggcgatcaaaaccgcgatgaccatttggaaggagatgaacagcgtgaacctgaagcaaaacattctgccgacccgtgaacgtgcgagcctgattctgaccaaaagtgcaaaccacatcgtggaggaagttcgtctgcgtaag

SEQ ID NO: 524 - protein, 326 aa, Artificial Sequence
  Engineered variant of Pantothenate Kinase from Escherichia coli
MHHHHHHGGSGSIKEQTEMTPYLQLDRNQWAAIRSSNPMTLSEDEIARLKGINEDLSLEEVAEVYLPLSRVLNLYISSALRRQAQLEQFLGTNSQRIPYIISVAGSVAVGKSTFARVLQALLSRWSEHRRVEHISTDGFLLPNQVLKERGLMGKKGFPESYDMHRLMKFVKDLKSGVPNVTAPVYSHLIYDVIPDGDKTVVQPDILILEGLNVLQSGMDYPGDPHHTFVSDFVDFSIYVDAPEDLLQTWYINRFLKLREGAFTDPDSYFHGYAKMTKEEAIKTAMTIWKEMNSVNLKQNILPTRERASLILTKSANHIVEEVRLRK

SEQ ID NO: 525 - DNA, 978 bp, Artificial Sequence
  Engineered variant of Pantothenate Kinase from Escherichia coli
atgcaccatcatcatcatcatggcggtagcggcagcatcaaagagcagaccgagatgactccgtacctgcaactggatcgtaaccaatgggccgcgattcgtagtagtaacccgatgaccctgagcgaggacgaaatcgcgtgcctgaagggtattaacgaagatctgagcctggaggaagtggcgctggtctacctgccgctgagccgtgttctgaacttctatattagcagcaacctgcgtcgtcaggcgcagctggaacagtttctgggtaccaatagccagcgtatcccgtatatcattagcgttgcgggtagcgtggcggttggcaaaagcacctttgcgcgtgtgctgcaggcgctgctgagccgttggtcggagcatcgtcgtgttgaacatatcagcaccgacggcttcctgctgccgaaccaagtgctgaaggagcgtggtctgatggggaaaaagggtttcccggaaagctacgatatgcatcgtctgatgaaatttgttaaagacctgaagagcggtgtgccgaacgttaccgcgccggtgtacagccacctgatctatgatgttattccggacggcgataaaaccgtggttcagccggacatcctgattctggagggtctgaacgtgctgcaaagcggcatggactatcctggggatccgcaccacacgtttgttagcgacttcgtggattttagcatctacgttgacgcgccggaggatctgctgcagacctggtacattaaccgtttcctgaaactgcgtgagggtgcgttcaccgacccggatagctactttcacgggtatgcgaaaatgaccaaggaagaggcgatcaaaaccgcgatgaccatttggaaggagatgaacagcgtgaacctgaagcaaaacattctgccgacccgtgaacgtgcgagcctgattctgaccaaaagtgcaaaccacatcgtggaggaagttcgtctgcgtaag

SEQ ID NO: 526 - protein, 326 aa, Artificial Sequence
  Engineered variant of Pantothenate Kinase from Escherichia coli
MHHHHHHGGSGSIKEQTEMTPYLQLDRNQWAAIRSSNPMTLSEDEIACLKGINEDLSLEEVALVYLPLSRVLNFYISSNLRRQAQLEQFLGTNSQRIPYIISVAGSVAVGKSTFARVLQALLSRWSEHRRVEHISTDGFLLPNQVLKERGLMGKKGFPESYDMHRLMKFVKDLKSGVPNVTAPVYSHLIYDVIPDGDKTVVQPDILILEGLNVLQSGMDYPGDPHHTFVSDFVDFSIYVDAPEDLLQTWYINRFLKLREGAFTDPDSYFHGYAKMTKEEAIKTAMTIWKEMNSVNLKQNILPTRERASLILTKSANHIVEEVRLRK

SEQ ID NO: 527 - DNA, 978 bp, Artificial Sequence
  Engineered variant of Pantothenate Kinase from Escherichia coli
atgcaccatcatcatcatcatggcggtagcggcagcatcaaagagcagaccgagatgggcccgtacctgcaactggatcgtaaccaatgggcagcgattcgtgatagtaacccgatgaccctgagcgaggacgaaatcgcgcgtctgaagggtattaacgaagatctgagcctggaggaagtggcggaagtctacctgccgctgagccgtgttctgaacttctatattagcagcaacctgcgtcgtcaggcgcagctggaacagtttctgggtaccaatggccagcgtatcccgtatatcattagcgttgcgggtagcgtggcggttggcaaaagcacctttgcgcgtgtgctgcagaccctgctgagccgttggtcggagcatcgtcgtgttgaacatatcagcaccgacggcttcctgctgccgaaccaagttctgaaggagcgtggtctgatggggaaaaagggtttcccggaaagctacgatatgcatcgtctgatgaaatttgttaaagacctgaagagcggtgtgccgaacgttaccgcgccggtgtacagccacctgatctatgatgttattccggacggcggcaaaaccgtggttcagccggacatcctgattctggagggtctgaacgtgctgcaaagcggcatggactatcctggggatccgcaccacacttttgttagcgacttcgtggattttagcatctacgttgacgcgccggaggatctgctgcagacctggtacattaaccgtttcctgaaactgcgtgagggtgcgttcaccgacccggatagctactttcacgggtatgcgaaactgaccaaggaagaggcgatcaaaaccgcgatgaccatttggaaggagatgaacagcgtgaacctgaagcaaaacattctgccgacccgtgaacgtgcgagcctgattctgaccaaaagtgcaaaccacatcgtggaggaagttcgtctgcgtaag

SEQ ID NO: 528 - protein, 326 aa, Artificial Sequence
  Engineered variant of Pantothenate Kinase from Escherichia coli
MHHHHHHGGSGSIKEQTEMGPYLQLDRNQWAAIRDSNPMTLSEDEIARLKGINEDLSLEEVAEVYLPLSRVLNFYISSNLRRQAQLEQFLGTNGQRIPYIISVAGSVAVGKSTFARVLQTLLSRWSEHRRVEHISTDGFLLPNQVLKERGLMGKKGFPESYDMHRLMKFVKDLKSGVPNVTAPVYSHLIYDVIPDGGKTVVQPDILILEGLNVLQSGMDYPGDPHHTFVSDFVDFSIYVDAPEDLLQTWYINRFLKLREGAFTDPDSYFHGYAKLTKEEAIKTAMTIWKEMNSVNLKQNILPTRERASLILTKSANHIVEEVRLRK

SEQ ID NO: 529 - DNA, 978 bp, Artificial Sequence
  Engineered variant of Pantothenate Kinase from Escherichia coli
atgcaccatcatcatcatcatggcggtagcggcagcatcaaagagcagaccgagatgactccgtacctgcaactggatcgtaaccaatgggccgcgattcgtagtagtaacccgatgaccctgagcgaggacgaaatcgcgcgtctgaagggtattaacgaagatctgagcctggaggaagtggcgctggtctacctgccgctgagccgtgttctgaacttttatattagcagcaacctgcgtcgtcaggcgcagctggaacagtttctgggtaccaatggccagcgtatcccgtatatcattagcgttgcgggtagcgtggcggttggcaaaagcacctttgcgcgtgtgctgcaggcgctgctgagccgttggtcggagcatcgtcgtgttgaacatatcagcaccgacggcttcctgctgccgaaccaagttctgaaggagcgtggtctgatggggaaaaagggtttcccggaaagctacgatatgcaccgtctgatgaaatttgttaaagacctgaagagcggtgtgccgaacgttaccgcgccggtgtacagccacctgatctatgatgttattccggacggcgataaaaccgtggttcagccggacatcctgattctggagggtctgaacgtgctgcaaagcggctgcgactatcctggggatccgcaccacacgtttgttagcgacttcgtggattttagcatctacgttgacgcgccggaggatctgctgcagacctggtacattaaccgtttcctgaaactgcgtgagggtgcgttcaccgacccggatagctactttcacgggtatgcgaaaatgaccaaggaagaggcgatcgcaaccgcgatgaccatttggaaggagatgaacagcgtgaacctgaagcaaaacattctgccgacccgtgaacgtgcgagcctgattctgaccaaaagtgcaaaccacatcgtggaggaagttcgtctgcgtaag

SEQ ID NO: 530 - protein, 326 aa, Artificial Sequence
  Engineered variant of Pantothenate Kinase from Escherichia coli
MHHHHHHGGSGSIKEQTEMTPYLQLDRNQWAAIRSSNPMTLSEDEIARLKGINEDLSLEEVALVYLPLSRVLNFYISSNLRRQAQLEQFLGTNGQRIPYIISVAGSVAVGKSTFARVLQALLSRWSEHRRVEHISTDGFLLPNQVLKERGLMGKKGFPESYDMHRLMKFVKDLKSGVPNVTAPVYSHLIYDVIPDGDKTVVQPDILILEGLNVLQSGCDYPGDPHHTFVSDFVDFSIYVDAPEDLLQTWYINRFLKLREGAFTDPDSYFHGYAKMTKEEAIATAMTIWKEMNSVNLKQNILPTRERASLILTKSANHIVEEVRLRK

SEQ ID NO: 531 - DNA, 978 bp, Artificial Sequence
  Engineered variant of Pantothenate Kinase from Escherichia coli
atgcaccatcatcatcatcatggcggtagcggcagcatcaaagagcagaccgagatgggtccgtacctgcaactggatcgtaaccaatgggcagcgattcgttcgagtaacccgatgaccctgagcgaggacgaaatcgcgtgcctgaagggtattaacgaagatctgagcctggaggaagtggcgctggtctacctgccgctgagccgtgttctgaacttctatattagcagcaacctgcgtcgtcaggcgcagctggaacagtttctgggtaccaatagccagcgtatcccgtatatcattagcgttgcgggtagcgtggcggttggcaaaagcacctttgcgcgtgtgctgcagaccctgctgagccgttggtcggagcatcgtcgtgttgaacatatcagcaccgacggcttcctgctgccgaaccaaattctgaaggagcgtggtctgatggggaaaaagggtttcccggaaagctacgatatgcaccgtctgatgaaatttgttaaagacctgaagagcggtgtgccgaacgttaccgcgccggtgtacagccacctgatctatgatgttattccggacggcggcaaaaccgtggttcagccggacatcctgattctggagggtctgaacgtgctgcaaagcggctgcgactatcctggggatccgcaccacgtgtttgttagcgacttcgtggattttagcatctacgttgacgcgccggaggatctgctgcagacctggtacattaaccgtttcctgaaactgcgtgagggtgcgttcaccgacccggatagctactttcacgggtatgcgaaactgaccaaggaagaggcgatcaaaaccgcgatgaccatttggaaggagatgaacagcgtgaacctgaagcaaaacattctgccgacccgtgaacgtgcgagcctgattctgaccaaaagtgcaaaccacatcgtggaggaagttcgtctgcgtaag

SEQ ID NO: 532 - protein, 326 aa, Artificial Sequence
  Engineered variant of Pantothenate Kinase from Escherichia coli
MHHHHHHGGSGSIKEQTEMGPYLQLDRNQWAAIRSSNPMTLSEDEIACLKGINEDLSLEEVALVYLPLSRVLNFYISSNLRRQAQLEQFLGTNSQRIPYIISVAGSVAVGKSTFARVLQTLLSRWSEHRRVEHISTDGFLLPNQILKERGLMGKKGFPESYDMHRLMKFVKDLKSGVPNVTAPVYSHLIYDVIPDGGKTVVQPDILILEGLNVLQSGCDYPGDPHHVFVSDFVDFSIYVDAPEDLLQTWYINRFLKLREGAFTDPDSYFHGYAKLTKEEAIKTAMTIWKEMNSVNLKQNILPTRERASLILTKSANHIVEEVRLRK

SEQ ID NO: 533 - DNA, 978 bp, Artificial Sequence
  Engineered variant of Pantothenate Kinase from Escherichia coli
atgcaccatcatcatcatcatggcggtagcggcagcatcaaagagcagaccgagatgggcccgtacctgcaactggatcgtaaccaatggcgcgcgattcgtgatagtaacccgatgaccctgagcgaggacgaaatcgcgcgtctgaagggtattaacgaagatctgagcctggaggaagtggcggaagtctacctgccgctgagccgtgttctgaacctgtatattagcagcgcgctgcgtcgtcaggcgcagctggaacagtttctgggtaccaatggccagcgtatcccgtatatcattagcgttgcgggtagcgtggcggttggcaaaagcacctttgcgcgtgtgctgcaggcgctgctgagccgttggtcggagcatcgtcgtgttgaacatatcagcaccgacggcttcctgctgccgaaccaagtgctgaaggagcgtggtctgatggggaaaaagggtttcccggaaagctacgatatgagtcgtctgatgaaatttgttaaagacctgaagagcggtgtgccgaacgttaccgcgccggtgtacagccacctgatctatgatgttattccggacggcgataaaaccgtggttcagccggacatcctgattctggagggtctgaacgtgctgcaaagcggctgcgactatcctggggatccgtaccacacgtttgttagcgacttcgtggattttagcatctacgttgacgcgccggaggatctgctgcagacctggtacattaaccgtttcctgaaactgcgtgagggtgcgttcaccgacccggatagctactttcacgggtatgcgaaactgaccaaggaagaggcgatcgcaaccgcgatgaccatttggaaggagatgaacagcgtgaacctgaagcaaaacattctgccgacccgtgaacgtgcgagcctgattctgaccaaaagtgcaaaccacatcgtggaggaagttcgtctgcgtaag

SEQ ID NO: 534 - protein, 326 aa, Artificial Sequence
  Engineered variant of Pantothenate Kinase from Escherichia coli
MHHHHHHGGSGSIKEQTEMGPYLQLDRNQWRAIRDSNPMTLSEDEIARLKGINEDLSLEEVAEVYLPLSRVLNLYISSALRRQAQLEQFLGTNGQRIPYIISVAGSVAVGKSTFARVLQALLSRWSEHRRVEHISTDGFLLPNQVLKERGLMGKKGFPESYDMSRLMKFVKDLKSGVPNVTAPVYSHLIYDVIPDGDKTVVQPDILILEGLNVLQSGCDYPGDPYHTFVSDFVDFSIYVDAPEDLLQTWYINRFLKLREGAFTDPDSYFHGYAKLTKEEAIATAMTIWKEMNSVNLKQNILPTRERASLILTKSANHIVEEVRLRK

SEQ ID NO: 535 - DNA, 978 bp, Artificial Sequence
  Engineered variant of Pantothenate Kinase from Escherichia coli
atgcaccatcatcatcatcatggcggtagcggcagcatcaaagagcagaccgagatgggcccgtacctgcaactggatcgtaaccaatgggccgcgattcgtagtagtaacccgatgaccctgagcgaggacgaaatcgcgcgtctgaagggtattaacgaagatctgagcctggaggaagtggcggaagtctacctgccgctgagccgtgttctgaacttttatattagcagcaacctgcgtcgtcaggcgcagctggaacagtttctgggtaccaatggccagcgtatcccgtatatcattagcgttgcgggtagcgtggcggttggcaaaagcacctttgcgcgtgtgctgcaggcgctgctgagccgttggtcggagcatcgtcgtgttgaacatatcagcaccgacggcttcctgctgccgaaccaagttctgaaggagcgtggtctgatggggaaaaagggtttcccggaaagctacgatatgcaccgtctgatgaaatttgttaaagacctgaagagcggtgtgccgaacgttaccgcgccggtgtacagccacctgatctatgatgttattccggacggcggcaaaaccgtggttcagccggacatcctgattctggagggtctgaacgtgctgcaaagcggcatggactatcctggggatccgtaccacgtgtttgttagcgacttcgtggattttagcatctacgttgacgcgccggaggatctgctgcagacctggtacattaaccgtttcctgaaactgcgtgagggtgcgttcaccgacccggatagctactttcacgggtatgcgaaactgaccaaggaagaggcgatcaaaaccgcgatgaccatttggaaggagatgaacagcgtgaacctgaagcaaaacattctgccgacccgtgaacgtgcgagcctgattctgaccaaaagtgcaaaccacatcgtggaggaagttcgtctgcgtaag

SEQ ID NO: 536 - protein, 326 aa, Artificial Sequence
  Engineered variant of Pantothenate Kinase from Escherichia coli
MHHHHHHGGSGSIKEQTEMGPYLQLDRNQWAAIRSSNPMTLSEDEIARLKGINEDLSLEEVAEVYLPLSRVLNFYISSNLRRQAQLEQFLGTNGQRIPYIISVAGSVAVGKSTFARVLQALLSRWSEHRRVEHISTDGFLLPNQVLKERGLMGKKGFPESYDMHRLMKFVKDLKSGVPNVTAPVYSHLIYDVIPDGGKTVVQPDILILEGLNVLQSGMDYPGDPYHVFVSDFVDFSIYVDAPEDLLQTWYINRFLKLREGAFTDPDSYFHGYAKLTKEEAIKTAMTIWKEMNSVNLKQNILPTRERASLILTKSANHIVEEVRLRK

SEQ ID NO: 537 - DNA, 978 bp, Artificial Sequence
  Engineered variant of Pantothenate Kinase from Escherichia coli
atgcaccatcatcatcatcatggcggtagcggcagcatcaaagagcagaccgagatgaccccgtacctgcaactggatcgtaaccaatgggccgcgattcgtagtagtaacccgatgaccctgagcgaggacgaaatcgcgcgtctgaagggtattaacgaagatctgagcctggaggaagtggcggaagtctacctgccgctgagccgtgttctgaacttctatattagcagcaacctgcgtcgtcaggcgcagctggaacagtttctgggtaccaatggcgatcgtatcccgtatatcattagcgttgcgggtagcgtggcggttggcaaaagcacctttgcgcgtgtgctgcaggcgctgctgagccgttggtcggagcatcgtcgtgttgaacatatcagcaccgacggcttcctgctgccgaaccaagtgctgaaggagcgtggtctgatggggaaaaagggtttcccggaaagctacgatatgcaccgtctgatgaaatttgttaaagacctgaagagcggtgtgccgaacgttaccgcgccggtgtacagccacctgatctatgatgttattccggacggcgataaaaccgtggttcagccggacatcctgattctggagggtctgaacgtgctgcaaagcggcatggactatcctggggatccgcaccacacttttgttagcgacttcgtggattttagcatctacgttgacgcgccggaggatctgctgcagacctggtacattaaccgtttcctgaaactgcgtgagggtgcgttcaccgacccggatagctactttcacgggtatgcgaaactgaccaaggaagaggcgatcaaaaccgcgatgaccatttggaaggagatgaacagcgtgaacctgaagcaaaacattctgccgacccgtgaacgtgcgagcctgattctgaccaaaagtgcaaaccacatcgtggaggaagttcgtctgcgtaag

SEQ ID NO: 538 - protein, 326 aa, Artificial Sequence
  Engineered variant of Pantothenate Kinase from Escherichia coli
MHHHHHHGGSGSIKEQTEMTPYLQLDRNQWAAIRSSNPMTLSEDEIARLKGINEDLSLEEVAEVYLPLSRVLNFYISSNLRRQAQLEQFLGTNGDRIPYIISVAGSVAVGKSTFARVLQALLSRWSEHRRVEHISTDGFLLPNQVLKERGLMGKKGFPESYDMHRLMKFVKDLKSGVPNVTAPVYSHLIYDVIPDGDKTVVQPDILILEGLNVLQSGMDYPGDPHHTFVSDFVDFSIYVDAPEDLLQTWYINRFLKLREGAFTDPDSYFHGYAKLTKEEAIKTAMTIWKEMNSVNLKQNILPTRERASLILTKSANHIVEEVRLRK

SEQ ID NO: 539 - DNA, 978 bp, Artificial Sequence
  Engineered variant of Pantothenate Kinase from Escherichia coli
atgcaccatcatcatcatcatggcggtagcggcagcatcaaagagcagaccgagatgaccccgtacctgcaactggatcgtaaccaatgggccgcgattcgtagtagtaacccgatgaccctgagcgaggacgaaatcgcgcgtctgaagggtattaacgaagatctgagcctggaggaagtggcggaagtctacctgccgctgagccgtgttctgaacttctatattagcagcaacctgcgtcgtcaggcgcagctggaacagtttctgggtaccaatggcgagcgtatcccgtatatcattagcgttgcgggtagcgtggcggttggcaaaagcacctttgcgcgtgtgctgcaggcgctgctgagccgttggtcggagcatcgtcgtgttgaacatatcagcaccgacggcttcctgctgccgaaccaagtgctgaaggagcgtggtctgatggggaaaaagggtttcccggaaagctacgatatgcaccgtctgatgaaatttgttaaagacctgaagagcggtgtgccgaacgttaccgcgccggtgtacagccacctgatctatgatgttattccggacggcgataaaaccgtggttcagccggacatcctgattctggagggtctgaacgtgctgcaaagcggcatggactatcctggggatccgcaccacacttttgttagcgacttcgtggattttagcatctacgttgacgcgccggaggatctgctgcagacctggtacattaaccgtttcctgaaactgcgtgagggtgcgttcaccgacccggatagctactttcacgggtatgcgaaactgaccaaggaagaggcgatcaaaaccgcgatgaccatttggaaggagatgaacagcgtgaacctgaagcaaaacattctgccgacccgtgaacgtgcgagcctgattctgaccaaaagtgcaaaccacatcgtggaggaagttcgtctgcgtaag

SEQ ID NO: 540 - protein, 326 aa, Artificial Sequence
  Engineered variant of Pantothenate Kinase from Escherichia coli
MHHHHHHGGSGSIKEQTEMTPYLQLDRNQWAAIRSSNPMTLSEDEIARLKGINEDLSLEEVAEVYLPLSRVLNFYISSNLRRQAQLEQFLGTNGERIPYIISVAGSVAVGKSTFARVLQALLSRWSEHRRVEHISTDGFLLPNQVLKERGLMGKKGFPESYDMHRLMKFVKDLKSGVPNVTAPVYSHLIYDVIPDGDKTVVQPDILILEGLNVLQSGMDYPGDPHHTFVSDFVDFSIYVDAPEDLLQTWYINRFLKLREGAFTDPDSYFHGYAKLTKEEAIKTAMTIWKEMNSVNLKQNILPTRERASLILTKSANHIVEEVRLRK

SEQ ID NO: 541 - DNA, 978 bp, Artificial Sequence
  Engineered variant of Pantothenate Kinase from Escherichia coli
atgcaccatcatcatcatcatggcggtagcggcagcatcaaagagcagaccgagatgaccccgtacctgcaactggatcgtaaccaatgggccgcgattcgtagtagtaacccgatgaccctgagcgaggacgaaatcgcgcgtctgaagggtattaacgaagatctgagcctggaggaagtggcggaagtctacctgccgctgagccgtgttctgaacttctatattagcagcaacctgcgtcgtcaggcgcagctggaacagtttctgggtaccaatggccagcgtatcccgtatatcattagcgttgcgggtagcgtggcggttggcaaaagcacctttgcgcgtgtgctgcaggcgctgctgagccgttggtcggagcatcgtcgtgttgaacatatcagcaccgacggcttcctgctgccgaaccaagtgctgaaggagcgtggtctgatggggaaaaagggtttcccggaaagctacgatatgcaccgtctgatgaaatttgttaaagacctgaagagcggtgtgccgaacgttaccgcgccggtgtacagccacctgatctatgatgttattccggacggcgataaaaccgtggttcagccggacatcctgattctggagggtctgaacgtgctgcaaagcggcatggactatcctggggatccgcaccacacttttgttagcgacttcgtggattttagcatctacgttgacgcgccggaggatctgctgcagacctggtacattaaccgtttcctgaaactgcgtgagggtgcgttcaccgacccggatagctactttcacgggtatgcgaaactgaccaaggaagaggcgatcaaaaccgcgatgaccatttggtgtgagatgaacagcgtgaacctgaagcaaaacattctgccgacccgtgaacgtgcgagcctgattctgaccaaaagtgcaaaccacatcgtggaggaagttcgtctgcgtaag

SEQ ID NO: 542 - protein, 326 aa, Artificial Sequence
  Engineered variant of Pantothenate Kinase from Escherichia coli
MHHHHHHGGSGSIKEQTEMTPYLQLDRNQWAAIRSSNPMTLSEDEIARLKGINEDLSLEEVAEVYLPLSRVLNFYISSNLRRQAQLEQFLGTNGQRIPYIISVAGSVAVGKSTFARVLQALLSRWSEHRRVEHISTDGFLLPNQVLKERGLMGKKGFPESYDMHRLMKFVKDLKSGVPNVTAPVYSHLIYDVIPDGDKTVVQPDILILEGLNVLQSGMDYPGDPHHTFVSDFVDFSIYVDAPEDLLQTWYINRFLKLREGAFTDPDSYFHGYAKLTKEEAIKTAMTIWCEMNSVNLKQNILPTRERASLILTKSANHIVEEVRLRK

SEQ ID NO: 543 - DNA, 978 bp, Artificial Sequence
  Engineered variant of Pantothenate Kinase from Escherichia coli
atgcaccatcatcatcatcatggcggtagcggcagcatcaaagagcagaccgagatgaccccgtacctgcaactggatcgtaaccaatgggccgcggtgcgtagtagtaacccgatgaccctgagcgaggacgaaatcgcgcgtctgaagggtattaacgaagatctgagcctggaggaagtggcggaagtctacctgccgctgagccgtgttctgaacttctatattagcagcaacctgcgtcgtcaggcgcagctggaacagtttctgggtaccaatggccagcgtatcccgtatatcattagcgttgcgggtagcgtggcggttggcaaaagcacctttgcgcgtgtgctgcaggcgctgctgagccgttggtcggagcatcgtcgtgttgaacatatcagcaccgacggcttcctgctgccgaaccaagtgctgaaggagcgtggtctgatggggaaaaagggtttcccggaaagctacgatatgcaccgtctgatgaaatttgttaaagacctgaagagcggtgtgccgaacgttaccgcgccggtgtacagccacctgatctatgatgttattccggacggcgataaaaccgtggttcagccggacatcctgattctggagggtctgaacgtgctgcaaagcggcatggactatcctggggatccgcaccacacttttgttagcgacttcgtggattttagcatctacgttgacgcgccggaggatctgctgcagacctggtacattaaccgtttcctgaaactgcgtgagggtgcgttcaccgacccggatagctactttcacgggtatgcgaaactgaccaaggaagaggcgatcaaaaccgcgatgaccatttggaaggagatgaacagcgtgaacctgaagcaaaacattctgccgacccgtgaacgtgcgagcctgattctgaccaaaagtgcaaaccacatcgtggaggaagttcgtctgcgtaag

SEQ ID NO: 544 - protein, 326 aa, Artificial Sequence
  Engineered variant of Pantothenate Kinase from Escherichia coli
MHHHHHHGGSGSIKEQTEMTPYLQLDRNQWAAVRSSNPMTLSEDEIARLKGINEDLSLEEVAEVYLPLSRVLNFYISSNLRRQAQLEQFLGTNGQRIPYIISVAGSVAVGKSTFARVLQALLSRWSEHRRVEHISTDGFLLPNQVLKERGLMGKKGFPESYDMHRLMKFVKDLKSGVPNVTAPVYSHLIYDVIPDGDKTVVQPDILILEGLNVLQSGMDYPGDPHHTFVSDFVDFSIYVDAPEDLLQTWYINRFLKLREGAFTDPDSYFHGYAKLTKEEAIKTAMTIWKEMNSVNLKQNILPTRERASLILTKSANHIVEEVRLRK

SEQ ID NO: 545 - DNA, 978 bp, Artificial Sequence
  Engineered variant of Pantothenate Kinase from Escherichia coli
atgcaccatcatcatcatcatggcggtagcggcagcatcaaagagcagaccgagatgaccccgtacctgcaactggatcgtaaccaatgggccgcgattcgtagtagtaacccgatgaccctgagcgaggacgaaatcgcgcgtctgaagggtattaacgaagatctgagcctggaggaagtggcggaagtctacctgccgctgagccgtgttctgaacttctatattagcagcaacctgcgtcgtcaggcgcagctggaacagtttctgggtaccaatggccagcgtatcccgtatatcattagcgttgcgggtagcgtggcggttggcaaaagcacctttgcgcgtgtgctgcaggcgctgctgagccgttggtcggagcatcgtcgtgttgaacatatcagcaccgacggcttcctgctgccgaaccaagtgctgaaggagcgtggtctgatggggaaaaagggtttcccggaaagctacgatatgcaccgtctgatgaaatttgttaaagacctgaagagcggtgtgccgaacgttaccgcgccggtgtacagccacctgatctatgatgttattccggacggcgataaaaccgtggttcagccggacatcctgattctggagggtctgaacgtgctgcaaagcggcatggactatcctggggatccgcaccacacttttgttagcgacttcgtggattttagcatctacgttgacgcgccggaggatctgctgcagacctggtacattaaccgtttcctgaaactgcgtgagggtgcgttcaccgacccggatagctactttcacatgtatgcgaaactgaccaaggaagaggcgatcaaaaccgcgatgaccatttggaaggagatgaacagcgtgaacctgaagcaaaacattctgccgacccgtgaacgtgcgagcctgattctgaccaaaagtgcaaaccacatcgtggaggaagttcgtctgcgtaag

SEQ ID NO: 546 - protein, 326 aa, Artificial Sequence
  Engineered variant of Pantothenate Kinase from Escherichia coli
MHHHHHHGGSGSIKEQTEMTPYLQLDRNQWAAIRSSNPMTLSEDEIARLKGINEDLSLEEVAEVYLPLSRVLNFYISSNLRRQAQLEQFLGTNGQRIPYIISVAGSVAVGKSTFARVLQALLSRWSEHRRVEHISTDGFLLPNQVLKERGLMGKKGFPESYDMHRLMKFVKDLKSGVPNVTAPVYSHLIYDVIPDGDKTVVQPDILILEGLNVLQSGMDYPGDPHHTFVSDFVDFSIYVDAPEDLLQTWYINRFLKLREGAFTDPDSYFHMYAKLTKEEAIKTAMTIWKEMNSVNLKQNILPTRERASLILTKSANHIVEEVRLRK

SEQ ID NO: 547 - DNA, 978 bp, Artificial Sequence
  Engineered variant of Pantothenate Kinase from Escherichia coli
atgcaccatcatcatcatcatggcggtagcggcagcatcaaagagcagaccgagatgaccccgtacctgcatctggatcgtaaccaatgggccgcgattcgtagtagtaacccgatgaccctgagcgaggacgaaatcgcgcgtctgaagggtattaacgaagatctgagcctggaggaagtggcggaagtctacctgccgctgagccgtgttctgaacttctatattagcagcaacctgcgtcgtcaggcgcagctggaacagtttctgggtaccaatggccagcgtatcccgtatatcattagcgttgcgggtagcgtggcggttggcaaaagcacctttgcgcgtgtgctgcaggcgctgctgagccgttggtcggagcatcgtcgtgttgaacatatcagcaccgacggcttcctgctgccgaaccaagtgctgaaggagcgtggtctgatggggaaaaagggtttcccggaaagctacgatatgcaccgtctgatgaaatttgttaaagacctgaagagcggtgtgccgaacgttaccgcgccggtgtacagccacctgatctatgatgttattccggacggcgataaaaccgtggttcagccggacatcctgattctggagggtctgaacgtgctgcaaagcggcatggactatcctggggatccgcaccacacttttgttagcgacttcgtggattttagcatctacgttgacgcgccggaggatctgctgcagacctggtacattaaccgtttcctgaaactgcgtgagggtgcgttcaccgacccggatagctactttcacgggtatgcgaaactgaccaaggaagaggcgatcaaaaccgcgatgaccatttggaaggagatgaacagcgtgaacctgaagcaaaacattctgccgacccgtgaacgtgcgagcctgattctgaccaaaagtgcaaaccacatcgtggaggaagttcgtctgcgtaag

SEQ ID NO: 548 - protein, 326 aa, Artificial Sequence
  Engineered variant of Pantothenate Kinase from Escherichia coli
MHHHHHHGGSGSIKEQTEMTPYLHLDRNQWAAIRSSNPMTLSEDEIARLKGINEDLSLEEVAEVYLPLSRVLNFYISSNLRRQAQLEQFLGTNGQRIPYIISVAGSVAVGKSTFARVLQALLSRWSEHRRVEHISTDGFLLPNQVLKERGLMGKKGFPESYDMHRLMKFVKDLKSGVPNVTAPVYSHLIYDVIPDGDKTVVQPDILILEGLNVLQSGMDYPGDPHHTFVSDFVDFSIYVDAPEDLLQTWYINRFLKLREGAFTDPDSYFHGYAKLTKEEAIKTAMTIWKEMNSVNLKQNILPTRERASLILTKSANHIVEEVRLRK

SEQ ID NO: 549 - DNA, 978 bp, Artificial Sequence
  Engineered variant of Pantothenate Kinase from Escherichia coli
atgcaccatcatcatcatcatggcggtagcggcagcatcaaagagcagaccgagatgaccccgtacctgcaactggatcgtaaccaatgggccgcgattcgtagtagtaacccgatgaccctgagcgaggacgaaatcgcgcgtctgaagggtattaacgaagatctgagcctggaggaagtggcggaagtctacctgccgctgagccgtgttctgaacttctatattagcagcaacctgcgtcgtcaggcgcagctggaacagtttctgggtaccaatggccagcgtatcccgtatatcattagcgttgcgggtagcgtggcggttggcaaaagcacctttgcgcgtgtgctgcaggcgctgctgagccgttggtcggagcatcgtcgtgttgaacatatcagcaccgacggcttcctgctgccgaaccaagtgctgaaggagcgtggtctgatggggaaaaagggtttcccggaaagctacgatatgcaccgtctgatgaaatttgttaaagacctgaagagcggtgtgcataacgttaccgcgccggtgtacagccacctgatctatgatgttattccggacggcgataaaaccgtggttcagccggacatcctgattctggagggtctgaacgtgctgcaaagcggcatggactatcctggggatccgcaccacacttttgttagcgacttcgtggattttagcatctacgttgacgcgccggaggatctgctgcagacctggtacattaaccgtttcctgaaactgcgtgagggtgcgttcaccgacccggatagctactttcacgggtatgcgaaactgaccaaggaagaggcgatcaaaaccgcgatgaccatttggaaggagatgaacagcgtgaacctgaagcaaaacattctgccgacccgtgaacgtgcgagcctgattctgaccaaaagtgcaaaccacatcgtggaggaagttcgtctgcgtaag

SEQ ID NO: 550 - protein, 326 aa, Artificial Sequence
  Engineered variant of Pantothenate Kinase from Escherichia coli
MHHHHHHGGSGSIKEQTEMTPYLQLDRNQWAAIRSSNPMTLSEDEIARLKGINEDLSLEEVAEVYLPLSRVLNFYISSNLRRQAQLEQFLGTNGQRIPYIISVAGSVAVGKSTFARVLQALLSRWSEHRRVEHISTDGFLLPNQVLKERGLMGKKGFPESYDMHRLMKFVKDLKSGVHNVTAPVYSHLIYDVIPDGDKTVVQPDILILEGLNVLQSGMDYPGDPHHTFVSDFVDFSIYVDAPEDLLQTWYINRFLKLREGAFTDPDSYFHGYAKLTKEEAIKTAMTIWKEMNSVNLKQNILPTRERASLILTKSANHIVEEVRLRK

SEQ ID NO: 551 - DNA, 978 bp, Artificial Sequence
  Engineered variant of Pantothenate Kinase from Escherichia coli
atgcaccatcatcatcatcatggcggtagcggcagcatcaaagagcagaccgagatgaccccgtacctgcaactggatcgtaaccaatgggccgcgattcgtagtagtaacccgatgaccctgagcgaggacgaaatcgcgcgtctgaagggtattaacgaagatctgagcctggaggaagtggcggaagtctacctgccgctgagccgtgttctgaacttctatattagcagcaacctgcgtcgtcaggcgcagctggaacagtttctgggtaccaatggccagcgtatcccgtatatcattagcgttgcgggtagcgtggcggttggcaaaagcacctttgcgcgtgtgctgcaggcgctgctgagccgttggtcggagcatcgtcgtgttgaacatatcagcaccgacggcttcctgctgccgaaccaagtgctgaaggagcgtggtctgatggggaaaaagggtttcccggaaagctacgatatgcaccgtctgatgaaatttgttaaagacctgaagagcggtgtgccgaacgttaccgcgccggtgtacagccacctgatctatgatgttattccggacatcgataaaaccgtggttcagccggacatcctgattctggagggtctgaacgtgctgcaaagcggcatggactatcctggggatccgcaccacacttttgttagcgacttcgtggattttagcatctacgttgacgcgccggaggatctgctgcagacctggtacattaaccgtttcctgaaactgcgtgagggtgcgttcaccgacccggatagctactttcacgggtatgcgaaactgaccaaggaagaggcgatcaaaaccgcgatgaccatttggaaggagatgaacagcgtgaacctgaagcaaaacattctgccgacccgtgaacgtgcgagcctgattctgaccaaaagtgcaaaccacatcgtggaggaagttcgtctgcgtaag

SEQ ID NO: 552 - protein, 326 aa, Artificial Sequence
  Engineered variant of Pantothenate Kinase from Escherichia coli
MHHHHHHGGSGSIKEQTEMTPYLQLDRNQWAAIRSSNPMTLSEDEIARLKGINEDLSLEEVAEVYLPLSRVLNFYISSNLRRQAQLEQFLGTNGQRIPYIISVAGSVAVGKSTFARVLQALLSRWSEHRRVEHISTDGFLLPNQVLKERGLMGKKGFPESYDMHRLMKFVKDLKSGVPNVTAPVYSHLIYDVIPDIDKTVVQPDILILEGLNVLQSGMDYPGDPHHTFVSDFVDFSIYVDAPEDLLQTWYINRFLKLREGAFTDPDSYFHGYAKLTKEEAIKTAMTIWKEMNSVNLKQNILPTRERASLILTKSANHIVEEVRLRK

SEQ ID NO: 553 - DNA, 978 bp, Artificial Sequence
  Engineered variant of Pantothenate Kinase from Escherichia coli
atgcaccatcatcatcatcatggcggtagcggcagcatcaaagagcagaccgagatgaccccgtacctgcaactggatcgtaaccaatgggccgcgattcgtagtagtaacccgatgaccctgagcgaggacgaaatcgcgcgtctgaagggtattaacgaagatctgagcctggaggaagtggcggaagtctacctgccgctgagccgtgttctgaacttctatattagcagcaacctgcgtcgtcaggcgcagctggaacagtttctgggtaccaatggccagcgtatcccgtatatcattagcgttgcgggtagcgtggcggttggcaaaagcacctttgcgcgtgtgctgcaggcgctgctgagccgttggtcggagcatcgtcgtgttgaacatatcagcaccgacggcttcctgctgccgaaccaagtgctgaaggagcgtggtctgatggggaaaaagggtttcccggaaagctacgatatgcaccgtctgatgaaatttgttaaagacctgaagagcggtgtgccgaacgttaccgcgccggtgtacagccacctgatctatgatgttattccggacggcgataaaaccgtggttcagccggacatcctgattctggagggtctgaacgtgctgcaaagcggcatggactatcctggggatccgcaccacacttttgttagcgacttcgtggattttagcatctacgttgacgcgccggaggatctgctgcagacctggtacattaaccgtttcctgaaactgcgtgagggtgcgttcaccgacccggatagctactttcacgggtatgcgaaactgacccgggaagaggcgatcaaaaccgcgatgaccatttggaaggagatgaacagcgtgaacctgaagcaaaacattctgccgacccgtgaacgtgcgagcctgattctgaccaaaagtgcaaaccacatcgtggaggaagttcgtctgcgtaag

SEQ ID NO: 554 - protein, 326 aa, Artificial Sequence
  Engineered variant of Pantothenate Kinase from Escherichia coli
MHHHHHHGGSGSIKEQTEMTPYLQLDRNQWAAIRSSNPMTLSEDEIARLKGINEDLSLEEVAEVYLPLSRVLNFYISSNLRRQAQLEQFLGTNGQRIPYIISVAGSVAVGKSTFARVLQALLSRWSEHRRVEHISTDGFLLPNQVLKERGLMGKKGFPESYDMHRLMKFVKDLKSGVPNVTAPVYSHLIYDVIPDGDKTVVQPDILILEGLNVLQSGMDYPGDPHHTFVSDFVDFSIYVDAPEDLLQTWYINRFLKLREGAFTDPDSYFHGYAKLTREEAIKTAMTIWKEMNSVNLKQNILPTRERASLILTKSANHIVEEVRLRK

SEQ ID NO: 555 - DNA, 978 bp, Artificial Sequence
  Engineered variant of Pantothenate Kinase from Escherichia coli
atgcaccatcatcatcatcatggcggtagcggcagcatcaaagagcagaccgagatgaccccgtacctgcaactggatcgtaaccaatgggccgcgattcgtagtagtaacccgatgaccctgagcgaggacgaaatcgcgcgtctgaagggtattaacgaagatctgagcctggaggaagtggcggaagtctacctgccgctgagccgtgttctgaacttctatattagcagcaacctgcgtcgtcaggcgcagctggaacagtttctgggtaccaatggccagcgtatcccgtatatcattagcgttgcgggtagcgtggcggttggcaaaagcacctttgcgcgtgtgctgcaggcgctgctgagccgttggtcggagcatcgtcgtgttgaacatatcagcaccgacggcttcctgctgccgaaccaagtgctgaaggagcgtggtctgatggggaaaaagggtttcccggaaagctacgatatgcaccgtctgatgaaatttgttaaagacctgaagagcggtgtggataacgttaccgcgccggtgtacagccacctgatctatgatgttattccggacggcgataaaaccgtggttcagccggacatcctgattctggagggtctgaacgtgctgcaaagcggcatggactatcctggggatccgcaccacacttttgttagcgacttcgtggattttagcatctacgttgacgcgccggaggatctgctgcagacctggtacattaaccgtttcctgaaactgcgtgagggtgcgttcaccgacccggatagctactttcacgggtatgcgaaactgaccaaggaagaggcgatcaaaaccgcgatgaccatttggaaggagatgaacagcgtgaacctgaagcaaaacattctgccgacccgtgaacgtgcgagcctgattctgaccaaaagtgcaaaccacatcgtggaggaagttcgtctgcgtaag

SEQ ID NO: 556 - protein, 326 aa, Artificial Sequence
  Engineered variant of Pantothenate Kinase from Escherichia coli
MHHHHHHGGSGSIKEQTEMTPYLQLDRNQWAAIRSSNPMTLSEDEIARLKGINEDLSLEEVAEVYLPLSRVLNFYISSNLRRQAQLEQFLGTNGQRIPYIISVAGSVAVGKSTFARVLQALLSRWSEHRRVEHISTDGFLLPNQVLKERGLMGKKGFPESYDMHRLMKFVKDLKSGVDNVTAPVYSHLIYDVIPDGDKTVVQPDILILEGLNVLQSGMDYPGDPHHTFVSDFVDFSIYVDAPEDLLQTWYINRFLKLREGAFTDPDSYFHGYAKLTKEEAIKTAMTIWKEMNSVNLKQNILPTRERASLILTKSANHIVEEVRLRK

SEQ ID NO: 557 - DNA, 978 bp, Artificial Sequence
  Engineered variant of Pantothenate Kinase from Escherichia coli
atgcaccatcatcatcatcatggcggtagcggcagcatcaaagagcagaccgagatgaccccgtacctggtgctggatcgtaaccaatgggccgcgattcgtagtagtaacccgatgaccctgagcgaggacgaaatcgcgcgtctgaagggtattaacgaagatctgagcctggaggaagtggcggaagtctacctgccgctgagccgtgttctgaacttctatattagcagcaacctgcgtcgtcaggcgcagctggaacagtttctgggtaccaatggccagcgtatcccgtatatcattagcgttgcgggtagcgtggcggttggcaaaagcacctttgcgcgtgtgctgcaggcgctgctgagccgttggtcggagcatcgtcgtgttgaacatatcagcaccgacggcttcctgctgccgaaccaagtgctgaaggagcgtggtctgatggggaaaaagggtttcccggaaagctacgatatgcaccgtctgatgaaatttgttaaagacctgaagagcggtgtgccgaacgttaccgcgccggtgtacagccacctgatctatgatgttattccggacggcgataaaaccgtggttcagccggacatcctgattctggagggtctgaacgtgctgcaaagcggcatggactatcctggggatccgcaccacacttttgttagcgacttcgtggattttagcatctacgttgacgcgccggaggatctgctgcagacctggtacattaaccgtttcctgaaactgcgtgagggtgcgttcaccgacccggatagctactttcacgggtatgcgaaactgaccaaggaagaggcgatcaaaaccgcgatgaccatttggaaggagatgaacagcgtgaacctgaagcaaaacattctgccgacccgtgaacgtgcgagcctgattctgaccaaaagtgcaaaccacatcgtggaggaagttcgtctgcgtaag

SEQ ID NO: 558 - protein, 326 aa, Artificial Sequence
  Engineered variant of Pantothenate Kinase from Escherichia coli
MHHHHHHGGSGSIKEQTEMTPYLVLDRNQWAAIRSSNPMTLSEDEIARLKGINEDLSLEEVAEVYLPLSRVLNFYISSNLRRQAQLEQFLGTNGQRIPYIISVAGSVAVGKSTFARVLQALLSRWSEHRRVEHISTDGFLLPNQVLKERGLMGKKGFPESYDMHRLMKFVKDLKSGVPNVTAPVYSHLIYDVIPDGDKTVVQPDILILEGLNVLQSGMDYPGDPHHTFVSDFVDFSIYVDAPEDLLQTWYINRFLKLREGAFTDPDSYFHGYAKLTKEEAIKTAMTIWKEMNSVNLKQNILPTRERASLILTKSANHIVEEVRLRK

SEQ ID NO: 559 - DNA, 978 bp, Artificial Sequence
  Engineered variant of Pantothenate Kinase from Escherichia coli
atgcaccatcatcatcatcatggcggtagcggcagcatcaaagagcagaccgagatgaccccgtacctgcaactggatcgtaaccaatgggccgcgattcgtagtagtaacccgatgaccctgagcgaggacgaaatcgcgcgtctgaagggtattaacgaagatctgagcctggaggaagtggcggaagtctacctgccgctgagccgtgttctgaacttctatattagcagcaacctgcgtcgtcaggcgcagctggaacagtttctgggtaccaatggccagcgtatcccgtatatcattagcgttgcgggtagcgtggcggttggcaaaagcacctttgcgcgtgtgctgcaggcgctgctgagccgttggtcggagcatcgtcgtgttgaacatatcagcaccgacggcttcctgctgccgaaccaagtgctgaaggagcgtggtctgatggggaaaaagggtttcccggaaagctacgatatgcaccgtctgatgaaatttgttaaagacctgaagagcggtgtgccgaacgttaccgcgccggtgtacagccacctgatctatgatgttattccggacggcgataaaaccgtggggcagccggacatcctgattctggagggtctgaacgtgctgcaaagcggcatggactatcctggggatccgcaccacacttttgttagcgacttcgtggattttagcatctacgttgacgcgccggaggatctgctgcagacctggtacattaaccgtttcctgaaactgcgtgagggtgcgttcaccgacccggatagctactttcacgggtatgcgaaactgaccaaggaagaggcgatcaaaaccgcgatgaccatttggaaggagatgaacagcgtgaacctgaagcaaaacattctgccgacccgtgaacgtgcgagcctgattctgaccaaaagtgcaaaccacatcgtggaggaagttcgtctgcgtaag

SEQ ID NO: 560 - protein, 326 aa, Artificial Sequence
  Engineered variant of Pantothenate Kinase from Escherichia coli
MHHHHHHGGSGSIKEQTEMTPYLQLDRNQWAAIRSSNPMTLSEDEIARLKGINEDLSLEEVAEVYLPLSRVLNFYISSNLRRQAQLEQFLGTNGQRIPYIISVAGSVAVGKSTFARVLQALLSRWSEHRRVEHISTDGFLLPNQVLKERGLMGKKGFPESYDMHRLMKFVKDLKSGVPNVTAPVYSHLIYDVIPDGDKTVGQPDILILEGLNVLQSGMDYPGDPHHTFVSDFVDFSIYVDAPEDLLQTWYINRFLKLREGAFTDPDSYFHGYAKLTKEEAIKTAMTIWKEMNSVNLKQNILPTRERASLILTKSANHIVEEVRLRK

SEQ ID NO: 561 - DNA, 978 bp, Artificial Sequence
  Engineered variant of Pantothenate Kinase from Escherichia coli
atgcaccatcatcatcatcatggcggtagcggcagcatcaaagagcagaccgagatgaccccgtacctgcaactggatcgtaaccaatgggccgcgattcgtagtagtaacccgatgaccctgagcgaggacgaaatcgcgcgtctgaagggtattaacgaagatctgagcctggaggaagtggcggaagtctacctgccgctgagccgtgttctgaacttctatattagcagcaacctgcgtcgtcaggcgcagctggaacagtttctgggtaccaatggccagcgtatcccgtatatcattagcgttgcgggtagcgtggcggttggcaaaagcacctttgcgcgtgtgctgcaggcgctgctgagccgttggtcggagcatcgtcgtgttgaacatatcagcaccgacggcttcctgctgccgaaccaagtgctgaaggagcgtggtctgatggggaaaaagggtttcccggaaagctacgatatgcaccgtctgatgaaatttgttaaagacctgaagagcggtgtgccgaacgttaccgcgccggtgtacagccacctgatctatgatgttattccggacggcgataaaaccgtggttcagccggacatcctgattctggagggtctgaacgtgctgcaaagcggcatggactatgggggggatccgcaccacacttttgttagcgacttcgtggattttagcatctacgttgacgcgccggaggatctgctgcagacctggtacattaaccgtttcctgaaactgcgtgagggtgcgttcaccgacccggatagctactttcacgggtatgcgaaactgaccaaggaagaggcgatcaaaaccgcgatgaccatttggaaggagatgaacagcgtgaacctgaagcaaaacattctgccgacccgtgaacgtgcgagcctgattctgaccaaaagtgcaaaccacatcgtggaggaagttcgtctgcgtaag

SEQ ID NO: 562 - protein, 326 aa, Artificial Sequence
  Engineered variant of Pantothenate Kinase from Escherichia coli
MHHHHHHGGSGSIKEQTEMTPYLQLDRNQWAAIRSSNPMTLSEDEIARLKGINEDLSLEEVAEVYLPLSRVLNFYISSNLRRQAQLEQFLGTNGQRIPYIISVAGSVAVGKSTFARVLQALLSRWSEHRRVEHISTDGFLLPNQVLKERGLMGKKGFPESYDMHRLMKFVKDLKSGVPNVTAPVYSHLIYDVIPDGDKTVVQPDILILEGLNVLQSGMDYGGDPHHTFVSDFVDFSIYVDAPEDLLQTWYINRFLKLREGAFTDPDSYFHGYAKLTKEEAIKTAMTIWKEMNSVNLKQNILPTRERASLILTKSANHIVEEVRLRK

SEQ ID NO: 563 - DNA, 978 bp, Artificial Sequence
  Engineered variant of Pantothenate Kinase from Escherichia coli
atgcaccatcatcatcatcatggcggtagcggcagcatcaaagagcagaccgagatgaccccgtacctgcaactggatcgtaaccaatgggccgcgattcgtagtagtaacccgatgaccctgagcgaggacgaaatcgcgcgtctgaagggtattaacgaagatctgagcctggaggaagtggcggaagtctacctgccgctgagccgtgttctgaacttctatattagcagcaacctgcgtcgtcaggcgcagctggaacagtttctgggtaccaatggccagcgtatcccgtatatcattagcgttgcgggtagcgtggcggttggcaaaagcacctttgcgcgtgtgctgcaggcgctgctgagccgttggtcggagcatcgtttggttgaacatatcagcaccgacggcttcctgctgccgaaccaagtgctgaaggagcgtggtctgatggggaaaaagggtttcccggaaagctacgatatgcaccgtctgatgaaatttgttaaagacctgaagagcggtgtgccgaacgttaccgcgccggtgtacagccacctgatctatgatgttattccggacggcgataaaaccgtggttcagccggacatcctgattctggagggtctgaacgtgctgcaaagcggcatggactatcctggggatccgcaccacacttttgttagcgacttcgtggattttagcatctacgttgacgcgccggaggatctgctgcagacctggtacattaaccgtttcctgaaactgcgtgagggtgcgttcaccgacccggatagctactttcacgggtatgcgaaactgaccaaggaagaggcgatcaaaaccgcgatgaccatttggaaggagatgaacagcgtgaacctgaagcaaaacattctgccgacccgtgaacgtgcgagcctgattctgaccaaaagtgcaaaccacatcgtggaggaagttcgtctgcgtaag

SEQ ID NO: 564 - protein, 326 aa, Artificial Sequence
  Engineered variant of Pantothenate Kinase from Escherichia coli
MHHHHHHGGSGSIKEQTEMTPYLQLDRNQWAAIRSSNPMTLSEDEIARLKGINEDLSLEEVAEVYLPLSRVLNFYISSNLRRQAQLEQFLGTNGQRIPYIISVAGSVAVGKSTFARVLQALLSRWSEHRLVEHISTDGFLLPNQVLKERGLMGKKGFPESYDMHRLMKFVKDLKSGVPNVTAPVYSHLIYDVIPDGDKTVVQPDILILEGLNVLQSGMDYPGDPHHTFVSDFVDFSIYVDAPEDLLQTWYINRFLKLREGAFTDPDSYFHGYAKLTKEEAIKTAMTIWKEMNSVNLKQNILPTRERASLILTKSANHIVEEVRLRK

SEQ ID NO: 565 - DNA, 978 bp, Artificial Sequence
  Engineered variant of Pantothenate Kinase from Escherichia coli
atgcaccatcatcatcatcatggcggtagcggcagcatcaaagagcagaccgagatgaccccgtacctgcaactggatcgtaaccaatgggccgcgattcgtagtagtaacccgatgaccctgagcgaggacgaagcggcgcgtctgaagggtattaacgaagatctgagcctggaggaagtggcggaagtctacctgccgctgagccgtgttctgaacttctatattagcagcaacctgcgtcgtcaggcgcagctggaacagtttctgggtaccaatggccagcgtatcccgtatatcattagcgttgcgggtagcgtggcggttggcaaaagcacctttgcgcgtgtgctgcaggcgctgctgagccgttggtcggagcatcgtcgtgttgaacatatcagcaccgacggcttcctgctgccgaaccaagtgctgaaggagcgtggtctgatggggaaaaagggtttcccggaaagctacgatatgcaccgtctgatgaaatttgttaaagacctgaagagcggtgtgccgaacgttaccgcgccggtgtacagccacctgatctatgatgttattccggacggcgataaaaccgtggttcagccggacatcctgattctggagggtctgaacgtgctgcaaagcggcatggactatcctggggatccgcaccacacttttgttagcgacttcgtggattttagcatctacgttgacgcgccggaggatctgctgcagacctggtacattaaccgtttcctgaaactgcgtgagggtgcgttcaccgacccggatagctactttcacgggtatgcgaaactgaccaaggaagaggcgatcaaaaccgcgatgaccatttggaaggagatgaacagcgtgaacctgaagcaaaacattctgccgacccgtgaacgtgcgagcctgattctgaccaaaagtgcaaaccacatcgtggaggaagttcgtctgcgtaag

SEQ ID NO: 566 - protein, 326 aa, Artificial Sequence
  Engineered variant of Pantothenate Kinase from Escherichia coli
MHHHHHHGGSGSIKEQTEMTPYLQLDRNQWAAIRSSNPMTLSEDEAARLKGINEDLSLEEVAEVYLPLSRVLNFYISSNLRRQAQLEQFLGTNGQRIPYIISVAGSVAVGKSTFARVLQALLSRWSEHRRVEHISTDGFLLPNQVLKERGLMGKKGFPESYDMHRLMKFVKDLKSGVPNVTAPVYSHLIYDVIPDGDKTVVQPDILILEGLNVLQSGMDYPGDPHHTFVSDFVDFSIYVDAPEDLLQTWYINRFLKLREGAFTDPDSYFHGYAKLTKEEAIKTAMTIWKEMNSVNLKQNILPTRERASLILTKSANHIVEEVRLRK

SEQ ID NO: 567 - DNA, 978 bp, Artificial Sequence
  Engineered variant of Pantothenate Kinase from Escherichia coli
atgcaccatcatcatcatcatggcggtagcggcagcatcaaagagcagaccgagatgaccccgtacctgcaactggatcgtaaccaatgggccgcgattcgtagtagtaacccgatgaccctgagcgaggacgaaatcgcgcgtctgaagggtattaacgaagatctgagcctggaggaagtggcggaagtctacctgccgctgagccgtgttctgaacttctatattagcagcaacctgcgtcgtcaggcgcagctggaacagtttctgggtaccaatggccagcgtatcccgtatatcattagcgttgcgggtagcgtggcggttggcaaaagcacctttgcgcgtgtgctgcaggcgctgctgagccgttggtcggagcatcgtcgtgttgaacatatcagcaccgacggcttcctgctgccgaaccaagtgctgaaggagcgtggtctgatggggaaaaagggtttcccggaaagctacgatatgcaccgtctgatgaaatttgttaaagacctgaagagcggtgtgccgaacgttaccgcgccggtgtacagccacctgatctatgatgttattccggacggcgataaaaccgtggttcagccggacatcctgattctggagggtctgaacgtgctgcaaagcggcatggactatcctggggatccgcaccacacttttgttagcgacttcgtggattttagcatctacgttgacgcgccggaggatctgctgcagacctggtacattaaccgtttcctgaaactgcgtgagggtgcgttcaccgacccggatagctactttcacgggtatgcgaaactgaccaaggaagaggcgatcaaaaccgcgatgaccatttggaaggagatgaactatgtgaacctgaagcaaaacattctgccgacccgtgaacgtgcgagcctgattctgaccaaaagtgcaaaccacatcgtggaggaagttcgtctgcgtaag

SEQ ID NO: 568 - protein, 326 aa, Artificial Sequence
  Engineered variant of Pantothenate Kinase from Escherichia coli
MHHHHHHGGSGSIKEQTEMTPYLQLDRNQWAAIRSSNPMTLSEDEIARLKGINEDLSLEEVAEVYLPLSRVLNFYISSNLRRQAQLEQFLGTNGQRIPYIISVAGSVAVGKSTFARVLQALLSRWSEHRRVEHISTDGFLLPNQVLKERGLMGKKGFPESYDMHRLMKFVKDLKSGVPNVTAPVYSHLIYDVIPDGDKTVVQPDILILEGLNVLQSGMDYPGDPHHTFVSDFVDFSIYVDAPEDLLQTWYINRFLKLREGAFTDPDSYFHGYAKLTKEEAIKTAMTIWKEMNYVNLKQNILPTRERASLILTKSANHIVEEVRLRK

SEQ ID NO: 569 - DNA, 978 bp, Artificial Sequence
  Engineered variant of Pantothenate Kinase from Escherichia coli
atgcaccatcatcatcatcatggcggtagcggcagcatcaaagagcagaccgagatgaccccgtacctgcaactggatcgtaaccaatgggccgcgattcgtagtagtaacccgatgaccctgagcgaggacgaaatcgcgcgtctgaagggtattaacgaagatctgagcctggaggaagtggcggaagtctacctgccgctgagccgtgttctgaacttctatattagcagcaacctgcgtcgtcaggcgcagctggaacagtttctgggtaccaatggccagcgtatcccgtatatcattagcgttgcgggtagcgtggcggttggcaaaagcacctttgcgcgtgtgctgcaggcgctgctgagccgttggtcggagcatcgtcgtgttgaacatatcagcaccgacggcttcctgctgccgaaccaagtgctgaaggagcgtggtctgatggggaaaaagggtttcccggaaagctacgatatgcaccgtctgatgaaatttgttaaagacctgaagagcggtgtgccgaacgttaccgcgccggtgtacagccacctgatctatgatgttattccggacggcgataaaaccgtggttcagccggacatcctgattctggagggtctgaacgtgctgcaaagcggcatggactatcctggggatccgcaccacacttttgttagcgacttcgtggattttagcatctacgttgacgcgccggaggatctgctgcagacctggtacattaaccgtttcctgaaactgcgtgagggtgcgttcaccgacccggatagctactttcacgggtatgcgaaactgaccaaggaagaggcgatcaaaaccgcgatgaccatttggaaggagatgaacagcgtgaacctgaagcaaaacattctgccgacccgtgaacgtgcgagcctgattctgaccaaaagtgcaaaccacatcgtggagttggttcgtctgcgtaag

SEQ ID NO: 570 - protein, 326 aa, Artificial Sequence
  Engineered variant of Pantothenate Kinase from Escherichia coli
MHHHHHHGGSGSIKEQTEMTPYLQLDRNQWAAIRSSNPMTLSEDEIARLKGINEDLSLEEVAEVYLPLSRVLNFYISSNLRRQAQLEQFLGTNGQRIPYIISVAGSVAVGKSTFARVLQALLSRWSEHRRVEHISTDGFLLPNQVLKERGLMGKKGFPESYDMHRLMKFVKDLKSGVPNVTAPVYSHLIYDVIPDGDKTVVQPDILILEGLNVLQSGMDYPGDPHHTFVSDFVDFSIYVDAPEDLLQTWYINRFLKLREGAFTDPDSYFHGYAKLTKEEAIKTAMTIWKEMNSVNLKQNILPTRERASLILTKSANHIVELVRLRK

SEQ ID NO: 571 - DNA, 978 bp, Artificial Sequence
  Engineered variant of Pantothenate Kinase from Escherichia coli
atgcaccatcatcatcatcatggcggtagcggcagcatcaaagagcagaccgagatgaccccgtacctgcaactggatcgtaaccaatgggccgcgattcgtagtagtaacccgatgaccctgagcgaggacgaaatcgcgcgtctgaagggtattaacgaagatctgagcctggaggaagtggcggaagtctacctgccgctgagccgtgttctgaacttctatattagcagcaacctgcgtcgtcaggcgcagctggaacagtttctgggtaccaatggccagcgtatcccgtatatcattagcgttgcgggtagcgtggcggttggcaaaagcacctttgcgcgtgtgctgcaggcgctgctgagccgttggtcggagcatcgtcgtgttgaacatatcagcaccgacggcttcctgctgccgaaccaagtgctgaaggaggcgggtctgatggggaaaaagggtttcccggaaagctacgatatgcaccgtctgatgaaatttgttaaagacctgaagagcggtgtgccgaacgttaccgcgccggtgtacagccacctgatctatgatgttattccggacggcgataaaaccgtggttcagccggacatcctgattctggagggtctgaacgtgctgcaaagcggcatggactatcctggggatccgcaccacacttttgttagcgacttcgtggattttagcatctacgttgacgcgccggaggatctgctgcagacctggtacattaaccgtttcctgaaactgcgtgagggtgcgttcaccgacccggatagctactttcacgggtatgcgaaactgaccaaggaagaggcgatcaaaaccgcgatgaccatttggaaggagatgaacagcgtgaacctgaagcaaaacattctgccgacccgtgaacgtgcgagcctgattctgaccaaaagtgcaaaccacatcgtggaggaagttcgtctgcgtaag

SEQ ID NO: 572 - protein, 326 aa, Artificial Sequence
  Engineered variant of Pantothenate Kinase from Escherichia coli
MHHHHHHGGSGSIKEQTEMTPYLQLDRNQWAAIRSSNPMTLSEDEIARLKGINEDLSLEEVAEVYLPLSRVLNFYISSNLRRQAQLEQFLGTNGQRIPYIISVAGSVAVGKSTFARVLQALLSRWSEHRRVEHISTDGFLLPNQVLKEAGLMGKKGFPESYDMHRLMKFVKDLKSGVPNVTAPVYSHLIYDVIPDGDKTVVQPDILILEGLNVLQSGMDYPGDPHHTFVSDFVDFSIYVDAPEDLLQTWYINRFLKLREGAFTDPDSYFHGYAKLTKEEAIKTAMTIWKEMNSVNLKQNILPTRERASLILTKSANHIVEEVRLRK

SEQ ID NO: 573 - DNA, 978 bp, Artificial Sequence
  Engineered variant of Pantothenate Kinase from Escherichia coli
atgcaccatcatcatcatcatggcggtagcggcagcatcaaagagcagaccgagatgaccccgtacctgcaactggatcgtaaccaatgggccgcgattcgtagtagtaacccgatgaccctgagcgaggacgaaatcgcgcgtctgaagggtattaacgaagatctgagcctggaggaagtggcggaagtctacctgccgctgagccgtgttctgaacttctatattagcagcaacctgcgtcgtcaggcgcagctggaacagtttctgggtaccaatggccagcgtatcccgtatatcattagcgttgcgggtagcgtggcggttggcaaaagcacctttgcgcgtgtgctgcaggcgctgctgagccgttggtcggagcatcgtcgtgttgaacatatcagcaccgacggcttcctgctgccgaaccaagtgctgaaggagcgtggtctgatggggaaaaagggtttcccggaaagctacgatatggggcgtctgatgaaatttgttaaagacctgaagagcggtgtgccgaacgttaccgcgccggtgtacagccacctgatctatgatgttattccggacggcgataaaaccgtggttcagccggacatcctgattctggagggtctgaacgtgctgcaaagcggcatggactatcctggggatccgcaccacacttttgttagcgacttcgtggattttagcatctacgttgacgcgccggaggatctgctgcagacctggtacattaaccgtttcctgaaactgcgtgagggtgcgttcaccgacccggatagctactttcacgggtatgcgaaactgaccaaggaagaggcgatcaaaaccgcgatgaccatttggaaggagatgaacagcgtgaacctgaagcaaaacattctgccgacccgtgaacgtgcgagcctgattctgaccaaaagtgcaaaccacatcgtggaggaagttcgtctgcgtaag

SEQ ID NO: 574 - protein, 326 aa, Artificial Sequence
  Engineered variant of Pantothenate Kinase from Escherichia coli
MHHHHHHGGSGSIKEQTEMTPYLQLDRNQWAAIRSSNPMTLSEDEIARLKGINEDLSLEEVAEVYLPLSRVLNFYISSNLRRQAQLEQFLGTNGQRIPYIISVAGSVAVGKSTFARVLQALLSRWSEHRRVEHISTDGFLLPNQVLKERGLMGKKGFPESYDMGRLMKFVKDLKSGVPNVTAPVYSHLIYDVIPDGDKTVVQPDILILEGLNVLQSGMDYPGDPHHTFVSDFVDFSIYVDAPEDLLQTWYINRFLKLREGAFTDPDSYFHGYAKLTKEEAIKTAMTIWKEMNSVNLKQNILPTRERASLILTKSANHIVEEVRLRK

SEQ ID NO: 575 - DNA, 978 bp, Artificial Sequence
  Engineered variant of Pantothenate Kinase from Escherichia coli
atgcaccatcatcatcatcatggcggtagcggcagcatcaaagagcagaccgagatgaccccgtacctgcaactggatcgtaaccaatgggccgcgattcgtagtagtaacccgatgaccctgagcgaggacgaaatcgcgcgtctgaagggtattaacgaagatctgagcctggaggaagtggcggaagtctacctgccgctgagccgtgttctgaacttctatattagcagcaacctgcgtcgtcaggcgcagctggaacagtttctgggtaccaatggccagcgtatcccgtatatcattagcgttgcgggtagcgtggcggttggcaaaagcacctttgcgcgtgtgctgcaggcgctgctgagccgttggtcggagcatcgtcgtgttgaacatatcagcaccgacggcttcctgctgccgaaccaagtgctgaaggagcgtggtctgatggggaaaaagggtttcccggaaagctacgatatgcaccgtctgatgaaatttgttaaagacctgaagagcggtgtgccgaacgttaccgcgccggtgtacagccacctgatctatgatgttattccggacggcgataaaaccgtggttcagccggacatcctgattctggagggtctgaacgtgctgcaaagcggcatggactatcctggggatccgcaccacacttttgttagcgacttcgtggattttagcatctacgttgacgcgccggaggatctgctgcagacctggtacattaaccgtttcctgaaactgcgtgagggtgcgttcaccgacccggatagctactttcacgggtatgcgaaactgaccaaggaagaggcgatcaaaaccgcgatgaccatttggaaggagatgaacagcgtgaacctgaaggagaacattctgccgacccgtgaacgtgcgagcctgattctgaccaaaagtgcaaaccacatcgtggaggaagttcgtctgcgtaag

SEQ ID NO: 576 - protein, 326 aa, Artificial Sequence
  Engineered variant of Pantothenate Kinase from Escherichia coli
MHHHHHHGGSGSIKEQTEMTPYLQLDRNQWAAIRSSNPMTLSEDEIARLKGINEDLSLEEVAEVYLPLSRVLNFYISSNLRRQAQLEQFLGTNGQRIPYIISVAGSVAVGKSTFARVLQALLSRWSEHRRVEHISTDGFLLPNQVLKERGLMGKKGFPESYDMHRLMKFVKDLKSGVPNVTAPVYSHLIYDVIPDGDKTVVQPDILILEGLNVLQSGMDYPGDPHHTFVSDFVDFSIYVDAPEDLLQTWYINRFLKLREGAFTDPDSYFHGYAKLTKEEAIKTAMTIWKEMNSVNLKENILPTRERASLILTKSANHIVEEVRLRK

SEQ ID NO: 577 - DNA, 978 bp, Artificial Sequence
  Engineered variant of Pantothenate Kinase from Escherichia coli
atgcaccatcatcatcatcatggcggtagcggcagcatcaaagagcagaccgagatgaccccgtacctgcaactggatcgtaaccaatgggccgcgattcgtagtagtaacccgatgaccctgagcgaggacgaaatcgcgcgtctgaagggtattaacgaagatctgagcctggaggaagtggcggaagtctacctgccgctgagccgtgttctgaacttctatattagcagcaacctgcgtcgtcaggcgcagctggaacagtttctgggtaccaatggccagcgtatcccgtatatcattagcgttgcgggtagcgtggcggttggcaaaagcacctttgcgcgtgtgctgcaggcgctgctgagccgttggtcggagcatcgtcgtgttgaacatatcagcaccgacggcttcctgctgccgaaccaagtgctgaaggagcgtggtctgatggggaaaaagggtttcccggaaagctacgatatgcaccgtctgatgaaatttgttaaagacctgaagagcggtgtgccgaacgttaccgcgccggtgtacagccacctgatctatgatgttattccggacggcgataaaaccgtggttcagccggacatcctgattctggagggtctgaacgtgctgcaaagcggcatggactatcctggggatccgcaccacacttttgttagcgacttcgtggattttagcatctacgttgacgcgccggaggatctgctgcagacctggtacattaaccgtttcctgaaactgcgtgagggtgcgttcaccgacccggatagctactttcacgggtatgcgaaactgaccaaggaagaggcgatcgataccgcgatgaccatttggaaggagatgaacagcgtgaacctgaagcaaaacattctgccgacccgtgaacgtgcgagcctgattctgaccaaaagtgcaaaccacatcgtggaggaagttcgtctgcgtaag

SEQ ID NO: 578 - protein, 326 aa, Artificial Sequence
  Engineered variant of Pantothenate Kinase from Escherichia coli
MHHHHHHGGSGSIKEQTEMTPYLQLDRNQWAAIRSSNPMTLSEDEIARLKGINEDLSLEEVAEVYLPLSRVLNFYISSNLRRQAQLEQFLGTNGQRIPYIISVAGSVAVGKSTFARVLQALLSRWSEHRRVEHISTDGFLLPNQVLKERGLMGKKGFPESYDMHRLMKFVKDLKSGVPNVTAPVYSHLIYDVIPDGDKTVVQPDILILEGLNVLQSGMDYPGDPHHTFVSDFVDFSIYVDAPEDLLQTWYINRFLKLREGAFTDPDSYFHGYAKLTKEEAIDTAMTIWKEMNSVNLKQNILPTRERASLILTKSANHIVEEVRLRK

SEQ ID NO: 579 - DNA, 978 bp, Artificial Sequence
  Engineered variant of Pantothenate Kinase from Escherichia coli
atgcaccatcatcatcatcatggcggtagcggcagcatcaaagagcagaccgagatgaccccgtacctgcaactggatcgtaaccaatgggccgcgattcgtagtagtaacccgatgaccctgagcgaggacgaaatcgcgcgtctgaagggtattaacgaagatctgagcctggaggaagtggcggaagtctacctgccgctgagccgtgttctgaacttctatattagcagcaacctgcgtcgtcaggcgcagctggaacagtttctgggtaccaatggccagcgtatcccgtatatcattagcgttgcgggtagcgtggcggttggcaaaagcacctttgcgcgtgtgctgcaggcgctgctgagccgttggtcggagcatcgtcgtgttgaacatatcagcaccgacggcttcctgctgccgaaccaagtgctgaaggagcgtggtctgatggggaaaaagggtttcccggaaagctacgatatgcaccgtctgatgaaatttgttaaagacctgaagagcggtgtgccgaacgttaccgcgccggtgtacagccacctgatctatgatgttattccggacggcgataaaaccgtggttcagccggacatcctgattctggagggtctgaacgtgctgcaaagcggcatggactatcctggggatccgcaccacacttttgttagcgacttcgtggattttagcatctacgttgacgcgccggaggatctgctgcagacctggtacattaaccgtttcctgaaactgcgtgagggtgcgttcaccgacccggatagctactttcacgggtatgcgaaactgaccaaggaagaggcgatcaaaaccgcgatgaccatttggaaggagatgaacagcgtgaacctgaagcaaaacattctgccgacccgtgaacgtgcgagcctgattctgaccaaaggggcaaaccacatcgtggaggaagttcgtctgcgtaag

SEQ ID NO: 580 - protein, 326 aa, Artificial Sequence
  Engineered variant of Pantothenate Kinase from Escherichia coli
MHHHHHHGGSGSIKEQTEMTPYLQLDRNQWAAIRSSNPMTLSEDEIARLKGINEDLSLEEVAEVYLPLSRVLNFYISSNLRRQAQLEQFLGTNGQRIPYIISVAGSVAVGKSTFARVLQALLSRWSEHRRVEHISTDGFLLPNQVLKERGLMGKKGFPESYDMHRLMKFVKDLKSGVPNVTAPVYSHLIYDVIPDGDKTVVQPDILILEGLNVLQSGMDYPGDPHHTFVSDFVDFSIYVDAPEDLLQTWYINRFLKLREGAFTDPDSYFHGYAKLTKEEAIKTAMTIWKEMNSVNLKQNILPTRERASLILTKGANHIVEEVRLRK

SEQ ID NO: 581 - DNA, 978 bp, Artificial Sequence
  Engineered variant of Pantothenate Kinase from Escherichia coli
atgcaccatcatcatcatcatggcggtagcggcagcatcaaagagcagaccgagatgaccccgtacctgcaactggatcgtaaccaatgggccgcgattcgtagtagtaacccgatgaccctgagcgaggacgaaatcgcgcgtctgaagggtattaacgaagatctgagcctggaggaagtggcggaagtctacctgccgctgagccgtgttctgaacttctatattagcagcaacctgcgtcgtcaggcgcagctggaacagtttctgggtaccaatggccagcgtatcccgtatatcattagcgttgcgggtagcgtggcggttggcaaaagcacctttgcgcgtgtgctgcaggcgctgctgagccgttggtcggagcatcgtcgtgttgaacatatcagcaccgacggcttcctgctgccgaaccaagtgctgaaggagcgtggtctgatggggaaaaagggtttcccggaaagctacgatatgcaccgtctgatgaaatttgttaaagacctgaagagcggtgtgccgaacgttaccgcgccggtgtacagccacctgatctatgatgttattccggacggcgataaaaccgtggttcagccggacatcctgattctggagggtctgaacgtgctgcaaagcggcatggactatcctggggatccgcaccacacttttgttagcgacttcgtggattttagcatctacgttgacgcgccggaggatctgctgcagacctggtacattaaccgtttcctgaaactgcgtgagggtgcgttcaccgacccggatagctactttcacgggtatgcgaaactgaccaaggaagaggcgatcaaaaccgcgatgaccatttggaaggagatgaacagcgtgaacctgaaggataacattctgccgacccgtgaacgtgcgagcctgattctgaccaaaagtgcaaaccacatcgtggaggaagttcgtctgcgtaag

SEQ ID NO: 582 - protein, 326 aa, Artificial Sequence
  Engineered variant of Pantothenate Kinase from Escherichia coli
MHHHHHHGGSGSIKEQTEMTPYLQLDRNQWAAIRSSNPMTLSEDEIARLKGINEDLSLEEVAEVYLPLSRVLNFYISSNLRRQAQLEQFLGTNGQRIPYIISVAGSVAVGKSTFARVLQALLSRWSEHRRVEHISTDGFLLPNQVLKERGLMGKKGFPESYDMHRLMKFVKDLKSGVPNVTAPVYSHLIYDVIPDGDKTVVQPDILILEGLNVLQSGMDYPGDPHHTFVSDFVDFSIYVDAPEDLLQTWYINRFLKLREGAFTDPDSYFHGYAKLTKEEAIKTAMTIWKEMNSVNLKDNILPTRERASLILTKSANHIVEEVRLRK

SEQ ID NO: 583 - DNA, 978 bp, Artificial Sequence
  Engineered variant of Pantothenate Kinase from Escherichia coli
atgcaccatcatcatcatcatggcggtagcggcagcatcaaagagcagaccgagatgaccccgtacctgcaactggatcgtaaccaatgggccgcgattcgtagtagtaacccgatgaccctgagcgaggacgaaatcgcggtgctgaagggtattaacgaagatctgagcctggaggaagtggcggaagtctacctgccgctgagccgtgttctgaacttctatattagcagcaacctgcgtcgtcaggcgcagctggaacagtttctgggtaccaatggccagcgtatcccgtatatcattagcgttgcgggtagcgtggcggttggcaaaagcacctttgcgcgtgtgctgcaggcgctgctgagccgttggtcggagcatcgtcgtgttgaacatatcagcaccgacggcttcctgctgccgaaccaagtgctgaaggagcgtggtctgatggggaaaaagggtttcccggaaagctacgatatgcaccgtctgatgaaatttgttaaagacctgaagagcggtgtgccgaacgttaccgcgccggtgtacagccacctgatctatgatgttattccggacggcgataaaaccgtggttcagccggacatcctgattctggagggtctgaacgtgctgcaaagcggcatggactatcctggggatccgcaccacacttttgttagcgacttcgtggattttagcatctacgttgacgcgccggaggatctgctgcagacctggtacattaaccgtttcctgaaactgcgtgagggtgcgttcaccgacccggatagctactttcacgggtatgcgaaactgaccaaggaagaggcgatcaaaaccgcgatgaccatttggaaggagatgaacagcgtgaacctgaagcaaaacattctgccgacccgtgaacgtgcgagcctgattctgaccaaaagtgcaaaccacatcgtggaggaagttcgtctgcgtaag

SEQ ID NO: 584 - protein, 326 aa, Artificial Sequence
  Engineered variant of Pantothenate Kinase from Escherichia coli
MHHHHHHGGSGSIKEQTEMTPYLQLDRNQWAAIRSSNPMTLSEDEIAVLKGINEDLSLEEVAEVYLPLSRVLNFYISSNLRRQAQLEQFLGTNGQRIPYIISVAGSVAVGKSTFARVLQALLSRWSEHRRVEHISTDGFLLPNQVLKERGLMGKKGFPESYDMHRLMKFVKDLKSGVPNVTAPVYSHLIYDVIPDGDKTVVQPDILILEGLNVLQSGMDYPGDPHHTFVSDFVDFSIYVDAPEDLLQTWYINRFLKLREGAFTDPDSYFHGYAKLTKEEAIKTAMTIWKEMNSVNLKQNILPTRERASLILTKSANHIVEEVRLRK

SEQ ID NO: 585 - DNA, 978 bp, Artificial Sequence
  Engineered variant of Pantothenate Kinase from Escherichia coli
atgcaccatcatcatcatcatggcggtagcggcagcatcaaagagcagaccgagatgaccccgtacctgcaactggatcgtaaccaatgggccgcgattcgtagtagtaacccgatgaccctgagcgaggacgaaatcgcgcgtctgaagggtattaacgaagatctgagcctggaggaagtggcggaagtctacctgccgctgagccgtgttctgaacttctatattagcagcaacctgcgtcgtcaggcgcagctggaacagtttctgggtaccaatggccagcgtatcccgtatatcattagcgttgcgggtagcgtggcggttggcaaaagcacctttgcgcgtgtgctgcaggcgctgctgagccgttggtcggagcatcgtcgtgttgaacatatcagcaccgacggcttcctgctgccgaaccaagtgctgaaggagcgtggtctgatggggaaaaagggtttcccggaaagctacgatatgcaccgtctgatgaaatttgttaaagacctgaagagcggtgtgccgaacgttaccgcgccggtgtacagccacctgatctatgatgttattccggacggcgataaaaccgtggttcagccggacatcctgattctggagggtctgaacgtgctgcaaagcggcatggactatcctggggatccgcaccacacttttgttagcgacttcgtggattttagcatctacgttgacgcgccggaggatctgctgcagacctggtacattaaccgtttcctgaaactgcgtgagggtgcgttcaccgacccggatagctactttcactgttatgcgaaactgaccaaggaagaggcgatcaaaaccgcgatgaccatttggaaggagatgaacagcgtgaacctgaagcaaaacattctgccgacccgtgaacgtgcgagcctgattctgaccaaaagtgcaaaccacatcgtggaggaagttcgtctgcgtaag

SEQ ID NO: 586 - protein, 326 aa, Artificial Sequence
  Engineered variant of Pantothenate Kinase from Escherichia coli
MHHHHHHGGSGSIKEQTEMTPYLQLDRNQWAAIRSSNPMTLSEDEIARLKGINEDLSLEEVAEVYLPLSRVLNFYISSNLRRQAQLEQFLGTNGQRIPYIISVAGSVAVGKSTFARVLQALLSRWSEHRRVEHISTDGFLLPNQVLKERGLMGKKGFPESYDMHRLMKFVKDLKSGVPNVTAPVYSHLIYDVIPDGDKTVVQPDILILEGLNVLQSGMDYPGDPHHTFVSDFVDFSIYVDAPEDLLQTWYINRFLKLREGAFTDPDSYFHCYAKLTKEEAIKTAMTIWKEMNSVNLKQNILPTRERASLILTKSANHIVEEVRLRK

SEQ ID NO: 587 - DNA, 978 bp, Artificial Sequence
  Engineered variant of Pantothenate Kinase from Escherichia coli
atgcaccatcatcatcatcatggcggtagcggcagcatcaaagagcagaccgagatgactccgtacctgcagctggatcgtaaccaatgggccgcggttcgtagtagtaacccgatgaccctgagcgaggacgaaatcgcgtgcctgaagggtattaacgaagatctgagcctggaggaagtggcgctggtctacctgccgctgagccgtgttctgaacttctatattagcagcaacctgcgtcgtcaggcgcagctggaacagtttctgggtaccaatagcaaccgtatcccgtatatcattagcgttacgggtagcgtggcggttggcaaaagcacctttgcgcgtgtgctgcaggcgctgctgagccgttggtcggagcatcgtcgtgttgaacatatcagcaccgacggcttcctgctgccgaaccaagtgctgaaggagcgtggtctgatggggaaaaagggtttcccggaaagctacgatatgcatcgtctgatgaaatttgttaaagacctgaagagcggtgtgccgaacgttaccgcgccggtgtacagccacctgatctatgatgttattccggacggcgataaaaccgtggttcagccggacatcctgattctggagggtctgaacgtgctgcaaagcggcatggactatcctggggatccgcaccacacgtttgttagcgacttcgtggattttagcatctacgttgacgcgccggaggatctgctgcagacctggtacattaaccgtttcctgaaactgcgtgagggtgcgttcaccgacccggatagctactttcacgggtatgcgaaaatgaccaaggaagaggcgatcaagaccgcgatgaccatttggaaggagatgaacagcgtgaacctgaagcaaaacattctgccgacccgtgaacgtgcgagcctgattctgaccaaaagcgcaaaccacatcgtggaggaagttcgtctgcgtaag

SEQ ID NO: 588 - protein, 326 aa, Artificial Sequence
  Engineered variant of Pantothenate Kinase from Escherichia coli
MHHHHHHGGSGSIKEQTEMTPYLQLDRNQWAAVRSSNPMTLSEDEIACLKGINEDLSLEEVALVYLPLSRVLNFYISSNLRRQAQLEQFLGTNSNRIPYIISVTGSVAVGKSTFARVLQALLSRWSEHRRVEHISTDGFLLPNQVLKERGLMGKKGFPESYDMHRLMKFVKDLKSGVPNVTAPVYSHLIYDVIPDGDKTVVQPDILILEGLNVLQSGMDYPGDPHHTFVSDFVDFSIYVDAPEDLLQTWYINRFLKLREGAFTDPDSYFHGYAKMTKEEAIKTAMTIWKEMNSVNLKQNILPTRERASLILTKSANHIVEEVRLRK

SEQ ID NO: 589 - DNA, 978 bp, Artificial Sequence
  Engineered variant of Pantothenate Kinase from Escherichia coli
atgcaccatcatcatcatcatggcggtagcggcagcatcaaagagcagaccgagatgactccgtacctgcaactggatcgtaaccaatgggccgcgattcgtagtagtaacccgatgaccctgagcgaggacgaaatcgcgtgcctgaagggtattaacgaagatctgagcctggaggaagtggcgctggtctacctgccgctgagccgtgttctgaacttctatattagcagcaacctgcgtcgtcaggcgcagctggaacagtttctgggtaccaatagccagcgtatcccgtatatcattagcgttgcgggtagcgtggcggttggcaaaagcacctttgcgcgtgtgctgcaggcgctgctgagccgttggtcggagcatcgtcgtgttgaacatatcagcaccgacggcttcctgctgccgaaccaagtgctgaaggagcgtggtctgatggggaaaaagggtttcccggaaagctacgatatgcatcgtctgatgaaatttgttaaagacctgaagagcggtgtgccgaacgttaccgcgccggtgtacagccacctgatctatgatgttattccggacggcgataaaaccgtggttcagccggacatcctgattctggagggtctgaacgtgctgcaaagcggcatggactatggcggggatccgcaccacacgtttgttagcgacttcgtggattttagcatctacgttgacgcgccggaggatctgctgcagacctggtacattaaccgtttcctgaaactgcgtgagggtgcgttcaccgacccggatagctactttcacgggtatgcgaaaatgaccaaggaagaggcgatcaaaaccgcgatgaccatttggtgcgagatgaacagcgtgaacctgaagcaaaacattctgccgacccgtgaacgtgcgagcctgattctgaccaaaagtgcaaaccacatcgtggaggaagttcgtctgcgtaag

SEQ ID NO: 590 - protein, 326 aa, Artificial Sequence
  Engineered variant of Pantothenate Kinase from Escherichia coli
MHHHHHHGGSGSIKEQTEMTPYLQLDRNQWAAIRSSNPMTLSEDEIACLKGINEDLSLEEVALVYLPLSRVLNFYISSNLRRQAQLEQFLGTNSQRIPYIISVAGSVAVGKSTFARVLQALLSRWSEHRRVEHISTDGFLLPNQVLKERGLMGKKGFPESYDMHRLMKFVKDLKSGVPNVTAPVYSHLIYDVIPDGDKTVVQPDILILEGLNVLQSGMDYGGDPHHTFVSDFVDFSIYVDAPEDLLQTWYINRFLKLREGAFTDPDSYFHGYAKMTKEEAIKTAMTIWCEMNSVNLKQNILPTRERASLILTKSANHIVEEVRLRK

SEQ ID NO: 591 - DNA, 978 bp, Artificial Sequence
  Engineered variant of Pantothenate Kinase from Escherichia coli
atgcaccatcatcatcatcatggcggtagcggcagcatcaaagagcagaccgagatgactccgtacctgcatctggatcgtaaccaatgggccgcgattcgtagtagtaacccgatgaccctgagcgaggacgaagtcgcgtgtctgaagggtattaacgaagatctgagcctggaggaagtggcgctggtctacctgccgctgagccgtgttctgaacttctatattagcagcaacctgcgtcgtcaggcgcagctggaacagtttctgggtaccaatagccagcgtatcccgtatatcattagcgttgcgggtagcgtggcggttggcaaaagcacctttgcgcgtgtgctgcaggcgctgctgagccgttggtcggagcatcgtcgtgttgaacatatcagcaccgacggcttcctgctgccgaaccaagtgctgaaggagcgtggtctgatggggaaaaagggtttcccggaaagctacgatatgcatcgtctgatgaaatttgttaaagacctgaagagcggtgtgccgaacgttaccgcgccggtgtacagccacctgatctatgatgttattccggacggcgataaaaccgtggttcagccggacatcctgattctggagggtctgaacgtgctgcaaagcggcatggactatggcggggatccgcaccacacgtttgttagcgacttcgtggattttagcatctacgttgacgcgccggaggatctgctgcagacctggtacattaaccgtttcctgaaactgcgtgagggtgcgttcaccgacccggatagctactttcacgggtatgcgaaaatgaccaaggaagaggcgatcaagaccgcgatgaccatttggaaggagatgaacagcgtgaacctgaagcaaaacattctgccgacccgtgaacgtgcgagcctgattctgaccaaaagtgcaaaccacatcgtggaggaagttcgtctgcgtaag

SEQ ID NO: 592 - protein, 326 aa, Artificial Sequence
  Engineered variant of Pantothenate Kinase from Escherichia coli
MHHHHHHGGSGSIKEQTEMTPYLHLDRNQWAAIRSSNPMTLSEDEVACLKGINEDLSLEEVALVYLPLSRVLNFYISSNLRRQAQLEQFLGTNSQRIPYIISVAGSVAVGKSTFARVLQALLSRWSEHRRVEHISTDGFLLPNQVLKERGLMGKKGFPESYDMHRLMKFVKDLKSGVPNVTAPVYSHLIYDVIPDGDKTVVQPDILILEGLNVLQSGMDYGGDPHHTFVSDFVDFSIYVDAPEDLLQTWYINRFLKLREGAFTDPDSYFHGYAKMTKEEAIKTAMTIWKEMNSVNLKQNILPTRERASLILTKSANHIVEEVRLRK

SEQ ID NO: 593 - DNA, 978 bp, Artificial Sequence
  Engineered variant of Pantothenate Kinase from Escherichia coli
atgcaccatcatcatcatcatggcggtagcggcagcatcaaagagcagaccgagatgactccgtacctgcatctggatcgtaaccaatgggccgcgattcgtagtagtaacccgatgaccctgagcgaggacgaaatcgcgtgcctgaagggtattaacgaagatctgagcctggaggaagtggcgctggtctacctgccgctgagccgtgttctgaacttctatattagcagcaacctgcgtcgtcaggcgcagctggaacagtttctgggtaccaatagccagcgtatcccgtatatcattagcgttgcgggtagcgtggcggttggcaaaagcacctttgcgcgtgtgctgcaggccctgctgagccgttggtcggagcatcgtcgtgttgaacatatcagcaccgacggcttcctgctgccgaaccaagtgctgaaggagcgtggtctgatggggaaaaagggtttcccggaaagctacgatatgcatcgtctgatgaaatttgttaaagacctgaagagcggtgtgccgaacgttaccgcgccggtgtacagccacctgatctatgatgttattccggacggcgataaaaccgtggttcagccggacatcctgattctggagggtctgaacgtgctgcaaagcggcatggactatccgggggatccgcaccacgtttttgttagcgacttcgtggattttagcatctacgttgacgcgccggaggatctgctgcagacctggtacattaaccgtttcctgaaactgcgtgagggtgcgttcaccgacccggatagctactttcacgggtatgcgaaaatgaccaaggaagaggcgatcaagaccgcgatgaccatttggaaggagatgaacagcgtgaacctgaagcaaaacattctgccgacccgtgaacgtgcgagcctgattctgaccaaaagtgcaaaccacatcgtggaggaagttcgtctgcgtaag

SEQ ID NO: 594 - protein, 326 aa, Artificial Sequence
  Engineered variant of Pantothenate Kinase from Escherichia coli
MHHHHHHGGSGSIKEQTEMTPYLHLDRNQWAAIRSSNPMTLSEDEIACLKGINEDLSLEEVALVYLPLSRVLNFYISSNLRRQAQLEQFLGTNSQRIPYIISVAGSVAVGKSTFARVLQALLSRWSEHRRVEHISTDGFLLPNQVLKERGLMGKKGFPESYDMHRLMKFVKDLKSGVPNVTAPVYSHLIYDVIPDGDKTVVQPDILILEGLNVLQSGMDYPGDPHHVFVSDFVDFSIYVDAPEDLLQTWYINRFLKLREGAFTDPDSYFHGYAKMTKEEAIKTAMTIWKEMNSVNLKQNILPTRERASLILTKSANHIVEEVRLRK

SEQ ID NO: 595 - DNA, 978 bp, Artificial Sequence
  Engineered variant of Pantothenate Kinase from Escherichia coli
atgcaccatcatcatcatcatggcggtagcggcagcatcaaagagcagaccgagatgactccgtacctgcagctggatcgtaaccaatgggccgcgattcgtagtagtaacccgatgaccctgagcgaggacgaagtcgcgtgtctgaagggtattaacgaagatctgagcctggaggaagtggcgctggtctacctgccgctgagccgtgttctgaacttctatattagcagcaacctgcgtcgtcaggcgcagctggaacagtttctgggtaccaatagcgaacgtatcccgtatatcattagcgttgcgggtagcgtggcggttggcaaaagcacctttgcgcgtgtgctgcaggcgctgctgagccgttggtcggagcatcgtcgtgttgaacatatcagcaccgacggcttcctgctgccgaaccaagtgctgaaggagcgtggtctgatggggaaaaagggtttcccggaaagctacgatatgcatcgtctgatgaaatttgttaaagacctgaagagcggtgtgccgaacgttaccgcgccggtgtacagccacctgatctatgatgttattccggacggcgataaaaccgtggttcagccggacatcctgattctggagggtctgaacgtgctgcaaagcggcatggactatcctggggatccgcaccacacgtttgttagcgacttcgtggattttagcatctacgttgacgcgccggaggatctgctgcagacctggtacattaaccgtttcctgaaactgcgtgagggtgcgttcaccgacccggatagctactttcacgggtatgcgaaaatgaccaaggaagaggcgatcgcaaccgcgatgaccatttggaaggagatgaacagcgtgaacctgaagcaaaacattctgccgacccgtgaacgtgcgagcctgattctgaccaaaagtgcaaaccacatcgtggaggaagttcgtctgcgtaag

SEQ ID NO: 596 - protein, 326 aa, Artificial Sequence
  Engineered variant of Pantothenate Kinase from Escherichia coli
MHHHHHHGGSGSIKEQTEMTPYLQLDRNQWAAIRSSNPMTLSEDEVACLKGINEDLSLEEVALVYLPLSRVLNFYISSNLRRQAQLEQFLGTNSERIPYIISVAGSVAVGKSTFARVLQALLSRWSEHRRVEHISTDGFLLPNQVLKERGLMGKKGFPESYDMHRLMKFVKDLKSGVPNVTAPVYSHLIYDVIPDGDKTVVQPDILILEGLNVLQSGMDYPGDPHHTFVSDFVDFSIYVDAPEDLLQTWYINRFLKLREGAFTDPDSYFHGYAKMTKEEAIATAMTIWKEMNSVNLKQNILPTRERASLILTKSANHIVEEVRLRK

SEQ ID NO: 597 - DNA, 978 bp, Artificial Sequence
  Engineered variant of Pantothenate Kinase from Escherichia coli
atgcaccatcatcatcatcatggcggtagcggcagcatcaaagagcagaccgagatgactccgtacctgcatctggatcgtaaccaatgggccgcggttcgtagtagtaacccgatgaccctgagcgaggacgaaatcgcgtgcctgaagggtattaacgaagatctgagcctggaggaagtggcgctggtctacctgccgctgagccgtgttctgaacttctatattagcagcaacctgcgtcgtcaggcgcagctggaacagtttctgggtaccaatagccagcgtatcccgtatatcattagcgttgcgggtagcgtggcggttggcaaaagcacctttgcgcgtgtgctgcaggcgctgctgagccgttggtcggagcatcgtcgtgttgaacatatcagcaccgacggcttcctgctgccgaaccaagtgctgaaggagcgtggtctgatggggaaaaagggtttcccggaaagctacgatatgcatcgtctgatgaaatttgttaaagacctgaagagcggtgtgccgaacgttaccgcgccggtgtacagccacctgatctatgatgttattccggacggcgataaaaccgtggttcagccggacatcctgattctggagggtctgaacgtgctgcaaagcggcatggactatcctggggatccgcaccacacgtttgttagcgacttcgtggattttagcatctacgttgacgcgccggaggatctgctgcagacctggtacattaaccgtttcctgaaactgcgtgagggtgcgttcaccgacccggatagctactttcacgggtatgcgaaaatgaccaaggaagaggcgatcaagaccgcgatgaccatttggaaggagatgaacagcgtgaacctgaagcaaaacattctgccgacccgtgaacgtgcgagcctgattctgaccaaaagtgcaaaccacatcgtggaggaagttcgtctgcgtaag

SEQ ID NO: 598 - protein, 326 aa, Artificial Sequence
  Engineered variant of Pantothenate Kinase from Escherichia coli
MHHHHHHGGSGSIKEQTEMTPYLHLDRNQWAAVRSSNPMTLSEDEIACLKGINEDLSLEEVALVYLPLSRVLNFYISSNLRRQAQLEQFLGTNSQRIPYIISVAGSVAVGKSTFARVLQALLSRWSEHRRVEHISTDGFLLPNQVLKERGLMGKKGFPESYDMHRLMKFVKDLKSGVPNVTAPVYSHLIYDVIPDGDKTVVQPDILILEGLNVLQSGMDYPGDPHHTFVSDFVDFSIYVDAPEDLLQTWYINRFLKLREGAFTDPDSYFHGYAKMTKEEAIKTAMTIWKEMNSVNLKQNILPTRERASLILTKSANHIVEEVRLRK

SEQ ID NO: 599 - DNA, 978 bp, Artificial Sequence
  Engineered variant of Pantothenate Kinase from Escherichia coli
atgcaccatcatcatcatcatggcggtagcggcagcatcaaagagcagaccgagatgactccgtacctgcaactggatcgtaaccaatgggccgcgattcgtagtagtaacccgatgaccctgagcgaggacgaaatcgcggttctgaagggtattaacgaagatctgagcctggaggaagtggcgctggtctacctgccgctgagccgtgttctgaacttctatattagcagcaacctgcgtcgtcaggcgcagctggaacagtttctgggtaccaatagccagcgtatcccgtatatcattagcgttgcgggtagcgtggcggttggcaaaagcacctttgcgcgtgtgctgcaggccctgctgagccgttggtcggagcatcgtcgtgttgaacatatcagcaccgacggcttcctgctgccgaaccaagtgctgaaggagcgtggtctgatggggaaaaagggtttcccggaaagctacgatatgcatcgtctgatgaaatttgttaaagacctgaagagcggtgtgcctaacgttaccgcgccggtgtacagccacctgatctatgatgttattccggacggcgataaaaccgtggttcagccggacatcctgattctggagggtctgaacgtgctgcaaagcggcatggactatcctggggatccgcaccacacgtttgttagcgacttcgtggattttagcatctacgttgacgcgccggaggatctgctgcagacctggtacattaaccgtttcctgaaactgcgtgagggtgcgttcaccgacccggatagctactttcacgggtatgcgaaaatgaccaaggaagaggcgatcaaaaccgcgatgaccatttggaaggagatgaacagcgtgaacctgaagcaaaacattctgccgacccgtgaacgtgcgagcctgattctgaccaaaagtgcaaaccacatcgtggaggaagttcgtctgcgtaag

SEQ ID NO: 600 - protein, 326 aa, Artificial Sequence
  Engineered variant of Pantothenate Kinase from Escherichia coli
MHHHHHHGGSGSIKEQTEMTPYLQLDRNQWAAIRSSNPMTLSEDEIAVLKGINEDLSLEEVALVYLPLSRVLNFYISSNLRRQAQLEQFLGTNSQRIPYIISVAGSVAVGKSTFARVLQALLSRWSEHRRVEHISTDGFLLPNQVLKERGLMGKKGFPESYDMHRLMKFVKDLKSGVPNVTAPVYSHLIYDVIPDGDKTVVQPDILILEGLNVLQSGMDYPGDPHHTFVSDFVDFSIYVDAPEDLLQTWYINRFLKLREGAFTDPDSYFHGYAKMTKEEAIKTAMTIWKEMNSVNLKQNILPTRERASLILTKSANHIVEEVRLRK

SEQ ID NO: 601 - DNA, 978 bp, Artificial Sequence
  Engineered variant of Pantothenate Kinase from Escherichia coli
atgcaccatcatcatcatcatggcggtagcggcagcatcaaagagcagaccgagatgactccgtacctgcagctggatcgtaaccaatgggccgcgattcgtagtagtaacccgatgaccctgagcgaggacgaaatcgcgtgcctgaagggtattaacgaagatctgagcctggaggaagtggcgctggtctacctgccgctgagccgtgttctgaacttctatattagcagcaacctgcgtcgtcaggcgcagctggaacagtttctgggtaccaatagccagcgtatcccgtatatcattagcgttgcgggtagcgtggcggttggcaaaagcacctttgcgcgtgtgctgcaggcgctgctgagccgttggtcggagcatcgtcgtgttgaacatatcagcaccgacggcttcctgctgccgaaccaagtgctgaaggagcgtggtctgatggggaaaaagggtttcccggaaagctacgatatgcatcgtctgatgaaatttgttaaagacctgaagagcggtgtgcctaacgttaccgcgccggtgtacagccacctgatctatgatgttattccggacggcgataaaaccgtgggccagccggacatcctgattctggagggtctgaacgtgctgcaaagcggcatggactatcctggggatccgcaccacacgtttgttagcgacttcgtggattttagcatctacgttgacgcgccggaggatctgctgcagacctggtacattaaccgtttcctgaaactgcgtgagggtgcgttcaccgacccggatagctactttcacgggtatgcgaaaatgaccaaggaagaggcgatcaaaaccgcgatgaccatttggaaggagatgaacagcgtgaacctgaagcaaaacattctgccgacccgtgaacgtgcgagcctgattctgaccaaaagtgcaaaccacatcgtggaggaggttcgtctgcgtaag

SEQ ID NO: 602 - protein, 326 aa, Artificial Sequence
  Engineered variant of Pantothenate Kinase from Escherichia coli
MHHHHHHGGSGSIKEQTEMTPYLQLDRNQWAAIRSSNPMTLSEDEIACLKGINEDLSLEEVALVYLPLSRVLNFYISSNLRRQAQLEQFLGTNSQRIPYIISVAGSVAVGKSTFARVLQALLSRWSEHRRVEHISTDGFLLPNQVLKERGLMGKKGFPESYDMHRLMKFVKDLKSGVPNVTAPVYSHLIYDVIPDGDKTVGQPDILILEGLNVLQSGMDYPGDPHHTFVSDFVDFSIYVDAPEDLLQTWYINRFLKLREGAFTDPDSYFHGYAKMTKEEAIKTAMTIWKEMNSVNLKQNILPTRERASLILTKSANHIVEEVRLRK

SEQ ID NO: 603 - DNA, 978 bp, Artificial Sequence
  Engineered variant of Pantothenate Kinase from Escherichia coli
atgcaccatcatcatcatcatggcggtagcggcagcatcaaagagcagaccgagatgactccgtacctgcagctggatcgtaaccaatgggccgcgattcgtagtagtaacccgatgaccctgagcgaggacgaaatcgcgtgcctgaagggtattaacgaagatctgagcctggaggaagtggcgctggtctacctgccgctgagccgtgttctgaacttctatattagcagcaacctgcgtcgtcaggcgcagctggaacagtttctgggtaccaatagccagcgtatcccgtatatcattagcgttgcgggtagcgtggcggttggcaaaagcacctttgcgcgtgtgctgcaggcgctgctgagccgttggtcggagcatcgtcgtgttgaacatatcagcaccgacggcttcctgctgccgaaccaagtgctgaaggagcgtggtctgatggggaaaaagggtttcccggaaagctacgatatgcatcgtctgatgaaatttgttaaagacctgaagagcggtgtggacaacgttaccgcgccggtgtacagccacctgatctatgatgttattccggacggcgataaaaccgtggttcagccggacatcctgattctggagggtctgaacgtgctgcaaagcggcatggactatcctggggatccgcaccacacgtttgttagcgacttcgtggattttagcatctacgttgacgcgccggaggatctgctgcagacctggtacattaaccgtttcctgaaactgcgtgagggtgcgttcaccgacccggatagctactttcacgggtatgcgaaaatgaccaaggaagaggcgatcaaaaccgcgatgaccatttggaaggagatgaactatgtgaacctgaaggataacattctgccgacccgtgaacgtgcgagcctgattctgaccaaaagtgcaaaccacatcgtggaggaggttcgtctgcgtaag

SEQ ID NO: 604 - protein, 326 aa, Artificial Sequence
  Engineered variant of Pantothenate Kinase from Escherichia coli
MHHHHHHGGSGSIKEQTEMTPYLQLDRNQWAAIRSSNPMTLSEDEIACLKGINEDLSLEEVALVYLPLSRVLNFYISSNLRRQAQLEQFLGTNSQRIPYIISVAGSVAVGKSTFARVLQALLSRWSEHRRVEHISTDGFLLPNQVLKERGLMGKKGFPESYDMHRLMKFVKDLKSGVDNVTAPVYSHLIYDVIPDGDKTVVQPDILILEGLNVLQSGMDYPGDPHHTFVSDFVDFSIYVDAPEDLLQTWYINRFLKLREGAFTDPDSYFHGYAKMTKEEAIKTAMTIWKEMNYVNLKDNILPTRERASLILTKSANHIVEEVRLRK

SEQ ID NO: 605 - DNA, 978 bp, Artificial Sequence
  Engineered variant of Pantothenate Kinase from Escherichia coli
atgcaccatcatcatcatcatggcggtagcggcagcatcaaagagcagaccgagatgactccgtacctgcaactggatcgtaaccaatgggccgcgattcgtagtagtaacccgatgaccctgagcgaggacgaaatcgcgtgcctgaagggtattaacgaagatctgagcctggaggaagtggcgctggtctacctgccgctgagccgtgttctgaacttctatattagcagcaacctgcgtcgtcaggcgcagctggaacagtttctgggtaccaatagcgatcgtatcccgtatatcattagcgttgcgggtagcgtggcggttggcaaaagcacctttgcgcgtgtgctgcaggcgctgctgagccgttggtcggagcatcgtcgtgttgaacatatcagcaccgacggcttcctgctgccgaaccaagtgctgaaggagcgtggtctgatggggaaaaagggtttcccggaaagctacgatatgcatcgtctgatgaaatttgttaaagacctgaagagcggtgtgcctaacgttaccgcgccggtgtacagccacctgatctatgatgttattccggacggcgataaaaccgtgggccagccggacatcctgattctggagggtctgaacgtgctgcaaagcggcatggactatcctggggatccgcaccacacgtttgttagcgacttcgtggattttagcatctacgttgacgcgccggaggatctgctgcagacctggtacattaaccgtttcctgaaactgcgtgagggtgcgttcaccgacccggatagctactttcacggttatgcgaaaatgaccaaggaagaggcgatcgataccgcgatgaccatttggaaggagatgaactatgtgaacctgaagcagaacattctgccgacccgtgaacgtgcgagcctgattctgaccaaaggcgcaaaccacatcgtggaggaggttcgtctgcgtaag

SEQ ID NO: 606 - protein, 326 aa, Artificial Sequence
  Engineered variant of Pantothenate Kinase from Escherichia coli
MHHHHHHGGSGSIKEQTEMTPYLQLDRNQWAAIRSSNPMTLSEDEIACLKGINEDLSLEEVALVYLPLSRVLNFYISSNLRRQAQLEQFLGTNSDRIPYIISVAGSVAVGKSTFARVLQALLSRWSEHRRVEHISTDGFLLPNQVLKERGLMGKKGFPESYDMHRLMKFVKDLKSGVPNVTAPVYSHLIYDVIPDGDKTVGQPDILILEGLNVLQSGMDYPGDPHHTFVSDFVDFSIYVDAPEDLLQTWYINRFLKLREGAFTDPDSYFHGYAKMTKEEAIDTAMTIWKEMNYVNLKQNILPTRERASLILTKGANHIVEEVRLRK

SEQ ID NO: 607 - DNA, 978 bp, Artificial Sequence
  Engineered variant of Pantothenate Kinase from Escherichia coli
atgcaccatcatcatcatcatggcggtagcggcagcatcaaagagcagaccgagatgactccgtacctggtcctggatcgtaaccaatgggccgcgattcgtagtagtaacccgatgaccctgagcgaggacgaaatcgcgtgcctgaagggtattaacgaagatctgagcctggaggaagtggcgctggtctacctgccgctgagccgtgttctgaacttctatattagcagcaacctgcgtcgtcaggcgcagctggaacagtttctgggtaccaatagccagcgtatcccgtatatcattagcgttgcgggtagcgtggcggttggcaaaagcacctttgcgcgtgtgctgcaggcgctgctgagccgttggtcggagcatcgtcgtgttgaacatatcagcaccgacggcttcctgctgccgaaccaagtgctgaaggagcgtggtctgatggggaaaaagggtttcccggaaagctacgatatgcatcgtctgatgaaatttgttaaagacctgaagagcggtgtgcctaacgttaccgcgccggtgtacagccacctgatctatgatgttattccggacggcgataaaaccgtgggccagccggacatcctgattctggagggtctgaacgtgctgcaaagcggcatggactatcctggggatccgcaccacacgtttgttagcgacttcgtggattttagcatctacgttgacgcgccggaggatctgctgcagacctggtacattaaccgtttcctgaaactgcgtgagggtgcgttcaccgacccggatagctactttcacgggtatgcgaaaatgaccaaggaagaggcgatcgataccgcgatgaccatttggaaggagatgaactcggtgaacctgaagcagaacattctgccgacccgtgaacgtgcgagcctgattctgaccaaaagtgcaaaccacatcgtggaggaagttcgtctgcgtaag

SEQ ID NO: 608 - protein, 326 aa, Artificial Sequence
  Engineered variant of Pantothenate Kinase from Escherichia coli
MHHHHHHGGSGSIKEQTEMTPYLVLDRNQWAAIRSSNPMTLSEDEIACLKGINEDLSLEEVALVYLPLSRVLNFYISSNLRRQAQLEQFLGTNSQRIPYIISVAGSVAVGKSTFARVLQALLSRWSEHRRVEHISTDGFLLPNQVLKERGLMGKKGFPESYDMHRLMKFVKDLKSGVPNVTAPVYSHLIYDVIPDGDKTVGQPDILILEGLNVLQSGMDYPGDPHHTFVSDFVDFSIYVDAPEDLLQTWYINRFLKLREGAFTDPDSYFHGYAKMTKEEAIDTAMTIWKEMNSVNLKQNILPTRERASLILTKSANHIVEEVRLRK

SEQ ID NO: 609 - DNA, 978 bp, Artificial Sequence
  Engineered variant of Pantothenate Kinase from Escherichia coli
atgcaccatcatcatcatcatggcggtagcggcagcatcaaagagcagaccgagatgactccgtacctgcaactggatcgtaaccaatgggccgcgattcgtagtagtaacccgatgaccctgagcgaggacgaaatcgcgtgcctgaagggtattaacgaagatctgagcctggaggaagtggcgctggtctacctgccgctgagccgtgttctgaacttctatattagcagcaacctgcgtcgtcaggcgcagctggaacagtttctgggtaccaatagccagcgtatcccgtatatcattagcgttgcgggtagcgtggcggttggcaaaagcacctttgcgcgtgtgctgcaggcgctgctgagccgttggtcggagcatcgtcgtgttgaacatatcagcaccgacggcttcctgctgccgaaccaagtgctgaaggagcgtggtctgatggggaaaaagggtttcccggaaagctacgatatgggtcgtctgatgaaatttgttaaagacctgaagagcggtgtgcctaacgttaccgcgccggtgtacagccacctgatctatgatgttattccggacggcgataaaaccgtgggccagccggacatcctgattctggagggtctgaacgtgctgcaaagcggcatggactatcctggggatccgcaccacacgtttgttagcgacttcgtggattttagcatctacgttgacgcgccggaggatctgctgcagacctggtacattaaccgtttcctgaaactgcgtgagggtgcgttcaccgacccggatagctactttcactgttatgcgaaaatgaccaaggaagaggcgatcaaaaccgcgatgaccatttggaaggagatgaacagcgtgaacctgaagcagaacattctgccgacccgtgaacgtgcgagcctgattctgaccaaaggcgcaaaccacatcgtggaggaggttcgtctgcgtaag

SEQ ID NO: 610 - protein, 326 aa, Artificial Sequence
  Engineered variant of Pantothenate Kinase from Escherichia coli
MHHHHHHGGSGSIKEQTEMTPYLQLDRNQWAAIRSSNPMTLSEDEIACLKGINEDLSLEEVALVYLPLSRVLNFYISSNLRRQAQLEQFLGTNSQRIPYIISVAGSVAVGKSTFARVLQALLSRWSEHRRVEHISTDGFLLPNQVLKERGLMGKKGFPESYDMGRLMKFVKDLKSGVPNVTAPVYSHLIYDVIPDGDKTVGQPDILILEGLNVLQSGMDYPGDPHHTFVSDFVDFSIYVDAPEDLLQTWYINRFLKLREGAFTDPDSYFHCYAKMTKEEAIKTAMTIWKEMNSVNLKQNILPTRERASLILTKGANHIVEEVRLRK

SEQ ID NO: 611 - DNA, 978 bp, Artificial Sequence
  Engineered variant of Pantothenate Kinase from Escherichia coli
atgcaccatcatcatcatcatggcggtagcggcagcatcaaagagcagaccgagatgactccgtacctgcaactggatcgtaaccaatgggccgcgattcgtagtagtaacccgatgaccctgagcgaggacgaaatcgcgtgcctgaagggtattaacgaagatctgagcctggaggaagtggcgctggtctacctgccgctgagccgtgttctgaacttctatattagcagcaacctgcgtcgtcaggcgcagctggaacagtttctgggtaccaatagccagcgtatcccgtatatcattagcgttgcgggtagcgtggcggttggcaaaagcacctttgcgcgtgtgctgcaggcgctgctgagccgttggtcggagcatcgtcgtgttgaacatatcagcaccgacggcttcctgctgccgaaccaagtgctgaaggagcgtggtctgatggggaaaaagggtttcccggaaagctacgatatgcatcgtctgatgaaatttgttaaagacctgaagagcggtgtgcctaacgttaccgcgccggtgtacagccacctgatctatgatgttattccggacggcgataaaaccgtggttcagccggacatcctgattctggagggtctgaacgtgctgcaaagcggcatggactatcctggggatccgcaccacacgtttgttagcgacttcgtggattttagcatctacgttgacgcgccggaggatctgctgcagacctggtacattaaccgtttcctgaaactgcgtgagggtgcgttcaccgacccggatagctactttcacggttatgcgaaaatgaccaaggaagaggcgatcaaaaccgcgatgaccatttggaaggagatgaactcggtgaacctgaaggataacattctgccgacccgtgaacgtgcgagcctgattctgaccaaaagtgcaaaccacatcgtggaggaagttcgtctgcgtaag

SEQ ID NO: 612 - protein, 326 aa, Artificial Sequence
  Engineered variant of Pantothenate Kinase from Escherichia coli
MHHHHHHGGSGSIKEQTEMTPYLQLDRNQWAAIRSSNPMTLSEDEIACLKGINEDLSLEEVALVYLPLSRVLNFYISSNLRRQAQLEQFLGTNSQRIPYIISVAGSVAVGKSTFARVLQALLSRWSEHRRVEHISTDGFLLPNQVLKERGLMGKKGFPESYDMHRLMKFVKDLKSGVPNVTAPVYSHLIYDVIPDGDKTVVQPDILILEGLNVLQSGMDYPGDPHHTFVSDFVDFSIYVDAPEDLLQTWYINRFLKLREGAFTDPDSYFHGYAKMTKEEAIKTAMTIWKEMNSVNLKDNILPTRERASLILTKSANHIVEEVRLRK

SEQ ID NO: 613 - DNA, 978 bp, Artificial Sequence
  Engineered variant of Pantothenate Kinase from Escherichia coli
atgcaccatcatcatcatcatggcggtagcggcagcatcaaagagcagaccgagatgactccgtacctggtcctggatcgtaaccaatgggccgcgattcgtagtagtaacccgatgaccctgagcgaggacgaaatcgcgtgcctgaagggtattaacgaagatctgagcctggaggaagtggcgctggtctacctgccgctgagccgtgttctgaacttctatattagcagcaacctgcgtcgtcaggcgcagctggaacagtttctgggtaccaatagccagcgtatcccgtatatcattagcgttgcgggtagcgtggcggttggcaaaagcacctttgcgcgtgtgctgcaggcgctgctgagccgttggtcggagcatcgtcgtgttgaacatatcagcaccgacggcttcctgctgccgaaccaagtgctgaaggaggcgggtctgatggggaaaaagggtttcccggaaagctacgatatgcatcgtctgatgaaatttgttaaagacctgaagagcggtgtgcctaacgttaccgcgccggtgtacagccacctgatctatgatgttattccggacggcgataaaaccgtgggccagccggacatcctgattctggagggtctgaacgtgctgcaaagcggcatggactatcctggggatccgcaccacacgtttgttagcgacttcgtggattttagcatctacgttgacgcgccggaggatctgctgcagacctggtacattaaccgtttcctgaaactgcgtgagggtgcgttcaccgacccggatagctactttcacggttatgcgaaaatgaccaaggaagaggcgatcgataccgcgatgaccatttggaaggagatgaacagcgtgaacctgaagcagaacattctgccgacccgtgaacgtgcgagcctgattttgaccaaaagtgcaaaccacatcgtggaggaggttcgtttgcgtaag

SEQ ID NO: 614 - protein, 326 aa, Artificial Sequence
  Engineered variant of Pantothenate Kinase from Escherichia coli
MHHHHHHGGSGSIKEQTEMTPYLVLDRNQWAAIRSSNPMTLSEDEIACLKGINEDLSLEEVALVYLPLSRVLNFYISSNLRRQAQLEQFLGTNSQRIPYIISVAGSVAVGKSTFARVLQALLSRWSEHRRVEHISTDGFLLPNQVLKEAGLMGKKGFPESYDMHRLMKFVKDLKSGVPNVTAPVYSHLIYDVIPDGDKTVGQPDILILEGLNVLQSGMDYPGDPHHTFVSDFVDFSIYVDAPEDLLQTWYINRFLKLREGAFTDPDSYFHGYAKMTKEEAIDTAMTIWKEMNSVNLKQNILPTRERASLILTKSANHIVEEVRLRK

SEQ ID NO: 615 - DNA, 978 bp, Artificial Sequence
  Engineered variant of Pantothenate Kinase from Escherichia coli
atgcaccatcatcatcatcatggcggtagcggcagcatcaaagagcagaccgagatgactccgtacctggtcctggatcgtaaccaatgggccgcgattcgtagtagtaacccgatgaccctgagcgaggacgaaatcgcgtgcctgaagggtattaacgaagatctgagcctggaggaagtggcgctggtctacctgccgctgagccgtgttctgaacttctatattagcagcaacctgcgtcgtcaggcgcagctggaacagtttctgggtaccaatagcgatcgtatcccgtatatcattagcgttgcgggtagcgtggcggttggcaaaagcacctttgcgcgtgtgctgcaggcgctgctgagccgttggtcggagcatcgtcgtgttgaacatatcagcaccgacggcttcctgctgccgaaccaagtgctgaaggagcgtggtctgatggggaaaaagggtttcccggaaagctacgatatgggtcgtctgatgaaatttgttaaagacctgaagagcggtgtggacaacgttaccgcgccggtgtacagccacctgatctatgatgttattccggacggcgataaaaccgtgggccagccggacatcctgattctggagggtctgaacgtgctgcaaagcggcatggactatcctggggatccgcaccacacgtttgttagcgacttcgtggattttagcatctacgttgacgcgccggaggatctgctgcagacctggtacattaaccgtttcctgaaactgcgtgagggtgcgttcaccgacccggatagctactttcacgggtatgcgaaaatgaccaaggaagaggcgatcgataccgcgatgaccatttggaaggagatgaacagcgtgaacctgaagcaaaacattctgccgacccgtgaacgtgcgagcctgattctgaccaaaagcgcaaaccacatcgtggaggaggttcgtctgcgtaag

SEQ ID NO: 616 - protein, 326 aa, Artificial Sequence
  Engineered variant of Pantothenate Kinase from Escherichia coli
MHHHHHHGGSGSIKEQTEMTPYLVLDRNQWAAIRSSNPMTLSEDEIACLKGINEDLSLEEVALVYLPLSRVLNFYISSNLRRQAQLEQFLGTNSDRIPYIISVAGSVAVGKSTFARVLQALLSRWSEHRRVEHISTDGFLLPNQVLKERGLMGKKGFPESYDMGRLMKFVKDLKSGVDNVTAPVYSHLIYDVIPDGDKTVGQPDILILEGLNVLQSGMDYPGDPHHTFVSDFVDFSIYVDAPEDLLQTWYINRFLKLREGAFTDPDSYFHGYAKMTKEEAIDTAMTIWKEMNSVNLKQNILPTRERASLILTKSANHIVEEVRLRK

SEQ ID NO: 617 - DNA, 978 bp, Artificial Sequence
  Engineered variant of Pantothenate Kinase from Escherichia coli
atgcaccatcatcatcatcatggcggtagcggcagcatcaaagagcagaccgagatgactccgtacctggtcctggatcgtaaccaatgggccgcgattcgtagtagtaacccgatgaccctgagcgaggacgaaatcgcgtgcctgaagggtattaacgaagatctgagcctggaggaagtggcgctggtctacctgccgctgagccgtgttctgaacttctatattagcagcaacctgcgtcgtcaggcgcagctggaacagtttctgggtaccaatagccagcgtatcccgtatatcattagcgttgcgggtagcgtggcggttggcaaaagcacctttgcgcgtgtgctgcaggcgctgctgagccgttggtcggagcatcgtcgtgttgaacatatcagcaccgacggcttcctgctgccgaaccaagtgctgaaggagcgtggtctgatggggaaaaagggtttcccggaaagctacgatatgcatcgtctgatgaaatttgttaaagacctgaagagcggtgtggacaacgttaccgcgccggtgtacagccacctgatctatgatgttattccggacggcgataaaaccgtgggccagccggacatcctgattctggagggtctgaacgtgctgcaaagcggcatggactatcctggggatccgcaccacacgtttgttagcgacttcgtggattttagcatctacgttgacgcgccggaggatctgctgcagacctggtacattaaccgtttcctgaaactgcgtgagggtgcgttcaccgacccggatagctactttcactgttatgcgaaaatgaccaaggaagaggcgatcgataccgcgatgaccatttggaaggagatgaactatgtgaacctgaaggaaaacattctgccgacccgtgaacgtgcgagcctgattctgaccaaaggcgcaaaccacatcgtggaggaagttcgtctgcgtaag

SEQ ID NO: 618 - protein, 326 aa, Artificial Sequence
  Engineered variant of Pantothenate Kinase from Escherichia coli
MHHHHHHGGSGSIKEQTEMTPYLVLDRNQWAAIRSSNPMTLSEDEIACLKGINEDLSLEEVALVYLPLSRVLNFYISSNLRRQAQLEQFLGTNSQRIPYIISVAGSVAVGKSTFARVLQALLSRWSEHRRVEHISTDGFLLPNQVLKERGLMGKKGFPESYDMHRLMKFVKDLKSGVDNVTAPVYSHLIYDVIPDGDKTVGQPDILILEGLNVLQSGMDYPGDPHHTFVSDFVDFSIYVDAPEDLLQTWYINRFLKLREGAFTDPDSYFHCYAKMTKEEAIDTAMTIWKEMNYVNLKENILPTRERASLILTKGANHIVEEVRLRK

SEQ ID NO: 619 - DNA, 978 bp, Artificial Sequence
  Engineered variant of Pantothenate Kinase from Escherichia coli
atgcaccatcatcatcatcatggcggtagcggcagcatcaaagagcagaccgagatgactccgtacctggtcctggatcgtaaccaatgggccgcgattcgtagtagtaacccgatgaccctgagcgaggacgaaatcgcgtgcctgaagggtattaacgaagatctgagcctggaggaagtggcgctggtctacctgccgctgagccgtgttctgaacttctatattagcagcaacctgcgtcgtcaggcgcagctggaacagtttctgggtaccaatagccagcgtatcccgtatatcattagcgttgcgggtagcgtggcggttggcaaaagcacctttgcgcgtgtgctgcaggcgctgctgagccgttggtcggagcatcgtcgtgttgaacatatcagcaccgacggcttcctgctgccgaaccaagtgctgaaggagcgtggtctgatggggaaaaagggtttcccggaaagctacgatatgcatcgtctgatgaaatttgttaaagacctgaagagcggtgtgcctaacgttaccgcgccggtgtacagccacctgatctatgatgttattccggacggcgataaaaccgtggttcagccggacatcctgattctggagggtctgaacgtgctgcaaagcggcatggactatcctggggatccgcaccacacgtttgttagcgacttcgtggattttagcatctacgttgacgcgccggaggatctgctgcagacctggtacattaaccgtttcctgaaactgcgtgagggtgcgttcaccgacccggatagctactttcacgggtatgcgaaaatgaccaaggaagaggcgatcaaaaccgcgatgaccatttggaaggagatgaacagcgtgaacctgaagcagaacattctgccgacccgtgaacgtgcgagcctgattctgaccaaaagcgcaaaccacatcgtggaggaagttcgtctgcgtaag

SEQ ID NO: 620 - protein, 326 aa, Artificial Sequence
  Engineered variant of Pantothenate Kinase from Escherichia coli
MHHHHHHGGSGSIKEQTEMTPYLVLDRNQWAAIRSSNPMTLSEDEIACLKGINEDLSLEEVALVYLPLSRVLNFYISSNLRRQAQLEQFLGTNSQRIPYIISVAGSVAVGKSTFARVLQALLSRWSEHRRVEHISTDGFLLPNQVLKERGLMGKKGFPESYDMHRLMKFVKDLKSGVPNVTAPVYSHLIYDVIPDGDKTVVQPDILILEGLNVLQSGMDYPGDPHHTFVSDFVDFSIYVDAPEDLLQTWYINRFLKLREGAFTDPDSYFHGYAKMTKEEAIKTAMTIWKEMNSVNLKQNILPTRERASLILTKSANHIVEEVRLRK

SEQ ID NO: 621 - DNA, 978 bp, Artificial Sequence
  Engineered variant of Pantothenate Kinase from Escherichia coli
atgcaccatcatcatcatcatggcggtagcggcagcatcaaagagcagaccgagatgactccgtacctggtcctggatcgtaaccaatgggccgcgattcgtagtagtaacccgatgaccctgagcgaggacgaaatcgcgtgcctgaagggtattaacgaagatctgagcctggaggaagtggcgctggtctacctgccgctgagccgtgttctgaacttctatattagcagcaacctgcgtcgtcaggcgcagctggaacagtttctgggtaccaatagccagcgtatcccgtatatcattagcgttgcgggtagcgtggcggttggcaaaagcacctttgcgcgtgtgctgcaggcgctgctgagccgttggtcggagcatcgtcgtgttgaacatatcagcaccgacggcttcctgctgccgaaccaagtgctgaaggaggcgggtctgatggggaaaaagggtttcccggaaagctacgatatgcatcgtctgatgaaatttgttaaagacctgaagagcggtgtggacaacgttaccgcgccggtgtacagccacctgatctatgatgttattccggacggcgataaaaccgtggtccagccggacatcctgattctggagggtctgaacgtgctgcaaagcggcatggactatcctggggatccgcaccacacgtttgttagcgacttcgtggattttagcatctacgttgacgcgccggaggatctgctgcagacctggtacattaaccgtttcctgaaactgcgtgagggtgcgttcaccgacccggatagctactttcacggttatgcgaaaatgaccaaggaagaggcgatcgataccgcgatgaccatttggaaggagatgaactatgtgaacctgaaggaaaacattctgccgacccgtgaacgtgcgagcctgattctgaccaaaagcgcaaaccacatcgtggaggaagttcgtctgcgtaag

SEQ ID NO: 622 - protein, 326 aa, Artificial Sequence
  Engineered variant of Pantothenate Kinase from Escherichia coli
MHHHHHHGGSGSIKEQTEMTPYLVLDRNQWAAIRSSNPMTLSEDEIACLKGINEDLSLEEVALVYLPLSRVLNFYISSNLRRQAQLEQFLGTNSQRIPYIISVAGSVAVGKSTFARVLQALLSRWSEHRRVEHISTDGFLLPNQVLKEAGLMGKKGFPESYDMHRLMKFVKDLKSGVDNVTAPVYSHLIYDVIPDGDKTVVQPDILILEGLNVLQSGMDYPGDPHHTFVSDFVDFSIYVDAPEDLLQTWYINRFLKLREGAFTDPDSYFHGYAKMTKEEAIDTAMTIWKEMNYVNLKENILPTRERASLILTKSANHIVEEVRLRK

SEQ ID NO: 623 - DNA, 978 bp, Artificial Sequence
  Engineered variant of Pantothenate Kinase from Escherichia coli
atgcaccatcatcatcatcatggcggtagcggcagcatcaaagagcagaccgagatgactccgtacctgcaactggatcgtaaccaatgggccgcgattcgtagtagtaacccgatgaccctgagcgaggacgaaatcgcgtgcctgaagggtattaacgaagatctgagcctggaggaagtggcgctggtctacctgccgctgagccgtgttctgaacttctatattagcagcaacctgcgtcgtcaggcgcagctggaacagtttctgggtaccaatagccagcgtatcccgtatatcattagcgttgcgggtagcgtggcggttggcaaaagcacctttgcgcgtgtgctgcaggcgctgctgagccgttggtcggagcatcgtcgtgttgaacatatcagcaccgacggcttcctgctgccgaaccaagtgctgaaggagcgtggtctgatggggaaaaagggtttcccggaaagctacgatatgcatcgtctgatgaaatttgttaaagacctgaagagcggtgtgccgaacgttaccgcgccggtgtacagccacctgatctatgatgttattccggacggcgataaaaccgtggttcagccggacatcctgattctggagggtctgaacgtgctgcaaagcggcatggactatcctggggatccgcaccacacgtttgttagcgacttcgtggattttagcatctacgttgacgcgccggaggatctgctgcagacctggtacattaaccgtttcctgaaactgcgtgagggtgcgttcaccgacccggatagctactttcacgggtatgcgaaaatgaccaaggaagaggcgatcgataccgcgatgaccatttggaaggagatgaactatgtgaacctgaaggaaaacattctgccgacccgtgaacgtgcgagcctgattctgaccaaaggcgcaaaccacatcgtggagctggttcgtctgcgtaag

SEQ ID NO: 624 - protein, 326 aa, Artificial Sequence
  Engineered variant of Pantothenate Kinase from Escherichia coli
MHHHHHHGGSGSIKEQTEMTPYLQLDRNQWAAIRSSNPMTLSEDEIACLKGINEDLSLEEVALVYLPLSRVLNFYISSNLRRQAQLEQFLGTNSQRIPYIISVAGSVAVGKSTFARVLQALLSRWSEHRRVEHISTDGFLLPNQVLKERGLMGKKGFPESYDMHRLMKFVKDLKSGVPNVTAPVYSHLIYDVIPDGDKTVVQPDILILEGLNVLQSGMDYPGDPHHTFVSDFVDFSIYVDAPEDLLQTWYINRFLKLREGAFTDPDSYFHGYAKMTKEEAIDTAMTIWKEMNYVNLKENILPTRERASLILTKGANHIVELVRLRK

SEQ ID NO: 625 - DNA, 978 bp, Artificial Sequence
  Engineered variant of Pantothenate Kinase from Escherichia coli
atgcaccatcatcatcatcatggcggtagcggcagcatcaaagagcagaccgagatgactccgtacctgcagctggatcgtaaccaatgggccgcgattcgtagtagtaacccgatgaccctgagcgaggacgaaatcgcgtgcctgaagggtattaacgaagatctgagcctggaggaagtggcgctggtctacctgccgctgagccgtgttctgaacttctatattagcagcaacctgcgtcgtcaggcgcagctggaacagtttctgggtaccaatagccagcgtatcccgtatatcattagcgttgcgggtagcgtggcggttggcaaaagcacctttgcgcgtgtgctgcaggcgctgctgagccgttggtcggagcatcgtcgtgttgaacatatcagcaccgacggcttcctgctgccgaaccaagtgctgaaggagcgtggtctgatggggaaaaagggtttcccggaaagctacgatatgcatcgtctgatgaaatttgttaaagacctgaagagcggtgtgccgaacgttaccgcgccggtgtacagccacctgatctatgatgttattccggacggcgataaaaccgtgggccagccggacatcctgattctggagggtctgaacgtgctgcaaagcggcatggactatcctggggatccgcaccacacgtttgttagcgacttcgtggattttagcatctacgttgacgcgccggaggatctgctgcagacctggtacattaaccgtttcctgaaactgcgtgagggtgcgttcaccgacccggatagctactttcacgggtatgcgaaaatgaccaaggaagaggcgatcgataccgcgatgaccatttggaaggagatgaacagcgtgaacctgaagcaaaacattctgccgacccgtgaacgtgcgagcctgattctgaccaaaagtgcaaaccacatcgtggaggaggttcgtctgcgtaag

SEQ ID NO: 626 - protein, 326 aa, Artificial Sequence
  Engineered variant of Pantothenate Kinase from Escherichia coli
MHHHHHHGGSGSIKEQTEMTPYLQLDRNQWAAIRSSNPMTLSEDEIACLKGINEDLSLEEVALVYLPLSRVLNFYISSNLRRQAQLEQFLGTNSQRIPYIISVAGSVAVGKSTFARVLQALLSRWSEHRRVEHISTDGFLLPNQVLKERGLMGKKGFPESYDMHRLMKFVKDLKSGVPNVTAPVYSHLIYDVIPDGDKTVGQPDILILEGLNVLQSGMDYPGDPHHTFVSDFVDFSIYVDAPEDLLQTWYINRFLKLREGAFTDPDSYFHGYAKMTKEEAIDTAMTIWKEMNSVNLKQNILPTRERASLILTKSANHIVEEVRLRK

SEQ ID NO: 627 - DNA, 978 bp, Artificial Sequence
  Engineered variant of Pantothenate Kinase from Escherichia coli
atgcaccatcatcatcatcatggcggtagcggcagcatcaaagagcagaccgagatgactccgtacctggtcctggatcgtaaccaatgggccgcgattcgtagtagtaacccgatgaccctgagcgaggacgaaatcgcgtgcctgaagggtattaacgaagatctgagcctggaggaagtggcgctggtctacctgccgctgagccgtgttctgaacttctatattagcagcaacctgcgtcgtcaggcgcagctggaacagtttctgggtaccaatagccagcgtatcccgtatatcattagcgttgcgggtagcgtggcggttggcaaaagcacctttgcgcgtgtgctgcaggcgctgctgagccgttggtcggagcatcgtcgtgttgaacatatcagcaccgacggcttcctgctgccgaaccaagtgctgaaggagcgtggtctgatggggaaaaagggtttcccggaaagctacgatatgcatcgtctgatgaaatttgttaaagacctgaagagcggtgtgcctaacgttaccgcgccggtgtacagccacctgatctatgatgttattccggacggcgataaaaccgtgggccagccggacatcctgattctggagggtctgaacgtgctgcaaagcggcatggactatcctggggatccgcaccacacgtttgttagcgacttcgtggattttagcatctacgttgacgcgccggaggatctgctgcagacctggtacattaaccgtttcctgaaactgcgtgagggtgcgttcaccgacccggatagctactttcactgttatgcgaaaatgaccaaggaagaggcgatcgataccgcgatgaccatttggaaggagatgaactatgtgaacctgaaggaaaacattctgccgacccgtgaacgtgcgagcctgattctgaccaaaagtgcaaaccacatcgtggaggaggttcgtctgcgtaag

SEQ ID NO: 628 - protein, 326 aa, Artificial Sequence
  Engineered variant of Pantothenate Kinase from Escherichia coli
MHHHHHHGGSGSIKEQTEMTPYLVLDRNQWAAIRSSNPMTLSEDEIACLKGINEDLSLEEVALVYLPLSRVLNFYISSNLRRQAQLEQFLGTNSQRIPYIISVAGSVAVGKSTFARVLQALLSRWSEHRRVEHISTDGFLLPNQVLKERGLMGKKGFPESYDMHRLMKFVKDLKSGVPNVTAPVYSHLIYDVIPDGDKTVGQPDILILEGLNVLQSGMDYPGDPHHTFVSDFVDFSIYVDAPEDLLQTWYINRFLKLREGAFTDPDSYFHCYAKMTKEEAIDTAMTIWKEMNYVNLKENILPTRERASLILTKSANHIVEEVRLRK

SEQ ID NO: 629 - DNA, 978 bp, Artificial Sequence
  Engineered variant of Pantothenate Kinase from Escherichia coli
atgcaccatcatcatcatcatggcggtagcggcagcatcaaagagcagaccgagatgactccgtacctggtcctggatcgtaaccaatgggccgcgattcgtagtagtaacccgatgaccctgagcgaggacgaaatcgcgtgcctgaagggtattaacgaagatctgagcctggaggaagtggcgctggtctacctgccgctgagccgtgttctgaacttctatattagcagcaacctgcgtcgtcaggcgcagctggaacagtttctgggtaccaatagccagcgtatcccgtatatcattagcgttgcgggtagcgtggcggttggcaaaagcacctttgcgcgtgtgctgcaggcgctgctgagccgttggtcggagcatcgtcgtgttgaacatatcagcaccgacggcttcctgctgccgaaccaagtgctgaaggaggcgggtctgatggggaaaaagggtttcccggaaagctacgatatgcatcgtctgatgaaatttgttaaagacctgaagagcggtgtgcctaacgttaccgcgccggtgtacagccacctgatctatgatgttattccggacggcgataaaaccgtggtccagccggacatcctgattctggagggtctgaacgtgctgcaaagcggcatggactatcctggggatccgcaccacacgtttgttagcgacttcgtggattttagcatctacgttgacgcgccggaggatctgctgcagacctggtacattaaccgtttcctgaaactgcgtgagggtgcgttcaccgacccggatagctactttcacggttatgcgaaaatgaccaaggaagaggcgatcgataccgcgatgaccatttggaaggagatgaactcggtgaacctgaagcagaacattctgccgacccgtgaacgtgcgagcctgattctgaccaaaggcgcaaaccacatcgtggaggaagttcgtctgcgtaag

SEQ ID NO: 630 - protein, 326 aa, Artificial Sequence
  Engineered variant of Pantothenate Kinase from Escherichia coli
MHHHHHHGGSGSIKEQTEMTPYLVLDRNQWAAIRSSNPMTLSEDEIACLKGINEDLSLEEVALVYLPLSRVLNFYISSNLRRQAQLEQFLGTNSQRIPYIISVAGSVAVGKSTFARVLQALLSRWSEHRRVEHISTDGFLLPNQVLKEAGLMGKKGFPESYDMHRLMKFVKDLKSGVPNVTAPVYSHLIYDVIPDGDKTVVQPDILILEGLNVLQSGMDYPGDPHHTFVSDFVDFSIYVDAPEDLLQTWYINRFLKLREGAFTDPDSYFHGYAKMTKEEAIDTAMTIWKEMNSVNLKQNILPTRERASLILTKGANHIVEEVRLRK

SEQ ID NO: 631 - DNA, 1239 bp, Artificial Sequence
  Variant of Acetate Kinase from Maritima thermatoga
atgggtagccatcatcatcatcatcacggtagccgtgttctgaatatcaatagcggtagcagcagcattaaatatcagctgattgaaatggaaggtgaaaaagttctgtgtaaaggtattgcagaacgtattggtattgaaggtagccgtctggttcatcgtgttggtgatgaaaaacatgttattgaacgtgaactgccggatcatgaagaagcactgaaactgattctgaataccctggttgatgaaaaactgggtgttattaaagatctgaaagaaattgacgcagttggtcatcgtgttgttcatggtggtgaacgttttaaagaaagcgttctggttgatgaagaagttctgaaagcaattgaagaagttagcccgctggcaccgctgcataatccggcaaatctgatgggtattaaagcagcaatgaaactgctgccgggtgttccgaatgttcaagtttttgataccgcatttcatcagaccattccgcagaaagcatatctgtatgcaattccgtatgaatattacgaaaaatacaaaattcgtcgctacggttttcatggtatcagccatcgttatgttagcaaacgtgcagcagaaattctgggtaaaaaactggaagaactgaaaattatcacctgtcatattggtaatggtgcaagcgttgcagcagttaaatatggtaaatgtgttgataccagcatgggttttaccccgctggaaggtctggttatgggtacccgtagcggtgatctggatccggcaattccgttttttattatggaaaaagagggtattagcccgcaggaaatgtatgatattctgaataaaaaaagcggcgtttatggtctgagcaaaggttttagcagcgatatgcgtgataatctggaagcagcactgaaaggtgatgaatggtgtaaactggttctggaaatttatgattaccgtattgcaaaatacatcggtgcatacgctgcagcaatgaatggtgttgatgcaattgtttttaccgcaggtgttggtgaaaatagcccgatcacccgtgaagatgtttgtaagtatctggaatttctgggtgttaaactggataaacagaaaaatgaagagaccattcgtggtaaagaaggtattattagcaccccggatagccgtgttaaagttctggttgttccgaccaatgaagaactgatgattgcacgtgataccaaagaaattgttgaaaaaatcggtcgt

SEQ ID NO: 632 - protein, 413 aa, Artificial Sequence
  Variant of Acetate Kinase from Maritima thermatoga
MGSHHHHHHGSRVLNINSGSSSIKYQLIEMEGEKVLCKGIAERIGIEGSRLVHRVGDEKHVIERELPDHEEALKLILNTLVDEKLGVIKDLKEIDAVGHRVVHGGERFKESVLVDEEVLKAIEEVSPLAPLHNPANLMGIKAAMKLLPGVPNVQVFDTAFHQTIPQKAYLYAIPYEYYEKYKIRRYGFHGISHRYVSKRAAEILGKKLEELKIITCHIGNGASVAAVKYGKCVDTSMGFTPLEGLVMGTRSGDLDPAIPFFIMEKEGISPQEMYDILNKKSGVYGLSKGFSSDMRDNLEAALKGDEWCKLVLEIYDYRIAKYIGAYAAAMNGVDAIVFTAGVGENSPITREDVCKYLEFLGVKLDKQKNEETIRGKEGIISTPDSRVKVLVVPTNEELMIARDTKEIVEKIGR

SEQ ID NO: 633 - DNA, 1239 bp, Artificial Sequence
  Variant of Acetate Kinase from Maritima thermatoga
atgggtagccatcatcatcatcatcacggtagccgtgttctgaatatcaatagcggtagcagcagcattaaatatcagctgattgaaatggaaggtgaaaaagttctgtgtaaaggtattgcagaacgtattggtattgaaggtagccgtctggttcatcgtgttggtgatgaaaaacatgttattgaacgtgaactgccggatcatgaagaagcactgaaactgattctgaataccctggttgatgaaaaactgggtgttattaaagatctgaaagaaattgacgcagttggtcatcgtgttgttcatggtggtgaacgttttaaagaaagcgttctggttgatgaagaagttctgaaagcaattgaagaagttagcccgctggcaccgctgcataatccggcaaatctgatgggtattaaagcagcaatgaaactgctgccgggtgttccgaatgttcaagtttttgataccgcatttcatcagaccattccgcagaaagcatatctgtatgcaattccgtatgaatattacgaaaaatacaaaattcgtcgctacggttttcatggtatcagccatcgttatgttagcaaacgtgcagcagaaattctgggtaaaaaactggaagaactgaaaattatcacctgtcatattggtaatggtgcaagcgttgcagcagttaaatatggtaaatgtgttgataccagcatgggttttaccccgctggaaggtctggttatgggtacccgtagcggtgatctggatccggcaattccgttttttattatggaaaaagagggtattagcccgcaggaaatgtatgatattctgaataaaaaaagcggcgtttatggtctgagcaaaggttttagcagcgatatgcgtgataatctggaagcagcactgaaaggtgatgaatggtgtaaactggttctggaaatttatgactaccgtattgcaaaatacatcggtgcatacgctgcagcaatgaatggtgttgatgcaattgtttttaccgcaggtgttggtgaaaatagcccgatcacccgtgaagatgtttgtaagtatctggaatttctgggtgttaaactggataaacagaaaaatgaagagactattctgggtaaagaaggtattattagcaccccggatagccgtgttaaagttctggttgttccgaccaatgaagaactgatgattgcacgtgataccaaagaaattgttgaaaaaatcggtcgt

SEQ ID NO: 634 - protein, 413 aa, Artificial Sequence
  Variant of Acetate Kinase from Maritima thermatoga
MGSHHHHHHGSRVLNINSGSSSIKYQLIEMEGEKVLCKGIAERIGIEGSRLVHRVGDEKHVIERELPDHEEALKLILNTLVDEKLGVIKDLKEIDAVGHRVVHGGERFKESVLVDEEVLKAIEEVSPLAPLHNPANLMGIKAAMKLLPGVPNVQVFDTAFHQTIPQKAYLYAIPYEYYEKYKIRRYGFHGISHRYVSKRAAEILGKKLEELKIITCHIGNGASVAAVKYGKCVDTSMGFTPLEGLVMGTRSGDLDPAIPFFIMEKEGISPQEMYDILNKKSGVYGLSKGFSSDMRDNLEAALKGDEWCKLVLEIYDYRIAKYIGAYAAAMNGVDAIVFTAGVGENSPITREDVCKYLEFLGVKLDKQKNEETILGKEGIISTPDSRVKVLVVPTNEELMIARDTKEIVEKIGR
